(19) United States
(12) Patent Application Publication
(10) Pub. No.: US 2015/0038680 A1
(43) Pub. Date: Feb. 5, 2015

(54) SPIDER SILK DRAGLINE POLYNUCLEOTIDES, POLYPEPTIDES AND METHODS OF USE THEREOF

(71) Applicant: The Refents of the University of University of California, Oakland, CA (US)

(72) Inventors: Cheryl Y. Hayashi, Riverside, CA (US); Nadia A. Ayoub, Lexington, VA (US); James Starrett, Riverside, CA (US)

(73) Assignee: The Regents of the University of California, Oakland, CA (US)

(21) Appl. No.: 14/379,982

(22) PCT Filed: Feb. 21, 2013
(86) PCT No.: PCT/US13/27182

§ 371 Date: Aug. 20, 2014

Related U.S. Application Data
(60) Provisional application No. 61/601,320, filed on Feb. 21, 2012.

(51) Int. Cl. C07K 14/435

(52) U.S. Cl. CPC C07K 14/43518
USPC 530/353; 536/23.5; 435/320.1; 435/254.21; 435/348; 435/419; 435/69.1

(57) ABSTRACT

The disclosure provides spider silk polypeptides and polynucleotides encoding the same. Methods of using such polypeptides and polynucleotides and designing novel biomaterials using repeat units of the polypeptides and polynucleotides.

### CROSS REFERENCE TO RELATED APPLICATIONS

[0001] This application claims priority under 35 U.S.C. §119 from Provisional Application Ser. No. 61/601,320, filed Feb. 21, 2012, the disclosure of which is incorporated herein by reference.

### STATEMENT AS TO FEDERALLY SPONSORED RESEARCH

[0002] The U.S. Government has certain rights in this disclosure pursuant to Grant No. W911NF-06-1-0455 awarded by the Army Research Office and Grant No. DEB-0910365 awarded by the National Science Foundation.

### FIELD OF THE DISCLOSURE

[0003] The disclosure relates to spider silk dragline polypeptides, polynucleotides and uses thereof.

### BACKGROUND

[0004] Ever increasing demands for materials and fabrics that are both light-weight and flexible without compromising strength and durability has created a need for new fibers possessing higher tolerances for such properties as elasticity, denier, tensile strength and modulus. The search for a better fiber has led to the investigation of fibers produced in nature, some of which possess remarkable qualities.

[0005] Silk is vital to the ecology of spiders, being used throughout their lifetime for a wide array of essential purposes. There are over 42,000 described species of spiders (Platnick, 2011), and they are not only taxonomically diverse but also ecologically diverse in their silk biology. Yet few species have been sampled for their silk genes

### SUMMARY

[0006] The spider silk compositions provided herein find uses in the textile industry (e.g., as filaments, yarns, ropes, and woven material). Such materials made using the methods and compositions described herein will take advantage of the extreme toughness, tensile strength, and extensibility of silk. In addition, the polypeptides of the disclosure can be used in pliant energy absorbing devices including armor and bumpers. Besides the mechanical properties of spider silk, silk is proteinaceous (thus not petroleum-based like nylon or Kevlar®). Accordingly, the polypeptides of the disclosure provide biocompatible and biodegradable material useful in various industries including textiles and medicine. For example, the supercontraction ability of dragline silk can be beneficial for sutures that can tighten, compression bandages, or space minimizing packaging. Additionally the polypeptides can be used in the generation of scaffolds and material in tissue engineering, implants and other cell scaffold-based materials.

[0007] The disclosure provides a number of isolated spider silk polynucleotides. The polynucleotides encode the Spidroin proteins from various spider species.

[0008] The disclosure provides a substantially purified polypeptide comprising an N-terminus sequence that is about 80-150 amino acids in length and having at least about 90% identity to SEQ ID NO:5 from amino acid position 71 to 151 followed by a sequence of SEQ ID NO:5 from position 1358-1384, wherein SEQ ID NO:5 from position 1358-1384 is preceded and/or followed by a glycine and alanine rich region and having a C-terminal region of about 50-100 amino acids in length and having at least about 90% identity to SEQ ID NO:5 from position 2085 to 2141, wherein the polypeptide has a property selected from the group consisting of (i) a Young's modulus of about 3.94 GPa, (ii) an Ultimate Strength of about 139 MPa, (iii) an Extensibility of about 0.818 mm/mm, (iv) a Toughness of about 66.7 MPa and (v) any combination of (i)-(iv). In one embodiment, the polypeptide comprises a sequence that is at least 95% identical to a sequence selected from the group consisting of SEQ ID NO:3, 5, 73, 75, 77, 79, 81 and 83. In another embodiment, the polypeptide comprises a sequence selected from the group consisting of SEQ ID NO:3, 5, 73, 75, 77, 79, 81 and 83. In a specific embodiment, the polypeptide comprises SEQ ID NO:5. In yet a more specific embodiment, the polypeptide consists of SEQ ID NO:5.

[0009] The disclosure also provides a substantially purified polypeptide comprising an N-terminal region that is at least 60% identical to SEQ ID NO:7 from amino acid 1 to about 167, followed by a tandem array of 16-20 repeat units of about 200-370 amino acid in length and having a C-terminal domain comprising at least 40% identity to SEQ ID NO:7 from about amino acid 6236 to 6333, wherein the polypeptide has a property selected from the group consisting of (i) a Young's modulus of about 9.8 to 10.4 GPa, (ii) an Ultimate strength of about 636 to 687 MPa, (iii) an Extensibility of about 0.505 to 0.83 mm/mm, (iv) a Toughness of about 230 MPa to 376 MPa and (v) any combination of (i)-(iv). In one embodiment, the polypeptide is about 4400-6300 amino acids in length and about 430 to about 630 kiloDaltons in molecular weight. In another embodiment, the polypeptide is at least 90% identical to SEQ ID NO:7 or 87. In yet another embodiment, the polypeptide is at least 95% identical to SEQ ID NO:7 or 87. In yet a further embodiment, the polypeptide comprises SEQ ID NO:7. In yet another embodiment, the polypeptide comprises SEQ ID NO:87.

[0010] The disclosure also provides polynucleotides encoding any of the foregoing sequences. In another embodiment, the disclosure comprise a vector and/or host cell containing the polynucleotide.

[0011] The disclosure also provides a substantially purified polypeptide comprising a sequence selected from the group consisting of SEQ ID NO:3, 5, 7, 9, 11, 13, 15, 17, 19, 21, 23, 25, 27, 29, 31, 33, 35, 37, 39, 41, 43, 45, 47, 49, 51, 53, 55, 57, 59, 61, 63, 65, 67, 69, 71, 73, 75, 77, 79, 81, 83, 85, 87, 89, 91, 93, 95, 97, 99, 101, 103, 105 and 107.

[0012] The disclosure also provides an isolated polynucleotide molecule selected from the group consisting of: (a) a polynucleotide molecule comprising a nucleotide sequence which is at least 80% identical to the nucleotide sequence of SEQ ID NO: 2, 4, 6, 8, 10, 12, 14, 16, 18, 20, 22, 24, 26, 28, 30, 32, 34, 36, 38, 40, 42, 44, 46, 48, 50, 52, 54, 56, 58, 60, 62, 64, 66, 68, 70, 72, 74, 76, 78, 80, 82, 84, 86, 88, 90, 92, 94, 96, 98, 100, 102, 104, or 106; (b) a polynucleotide molecule which encodes a polypeptide comprising the amino acid sequence of SEQ ID NO: 3, 5, 7, 9, 11, 13, 15, 17, 19, 21, 23, 25, 27, 29, 31, 33, 35, 37, 39, 41, 43, 45, 47, 49, 51, 53, 55, 57, 59, 61, 63, 65, 67, 69, 71, 73, 75, 77, 79, 81, 83, 85, 87, 89, 91, 93, 95, 97, 99, 101, 103, 105 and 107; (c) a polynucleotide molecule which encodes a naturally occurring allelic variant of a polypeptide comprising the amino acid sequence of SEQ ID NO: 3, 5, 7, 9, 11, 13, 15, 17, 19, 21, 23, 25, 27, 29, 31, 33, 35, 37, 39, 41, 43, 45, 47, 49, 51, 53, 55, 57, 59, 61, 63, 65, 67, 69, 71, 73, 75, 77, 79, 81, 83, 85, 87, 89, 91, 93, 95, 97, 99, 101, 103, 105 and 107, wherein the polynucleotide molecule hybridizes to a polynucleotide molecule comprising SEQ ID NO: 2, 4, 6, 8, 10, 12, 14, 16, 18, 20, 22, 24, 26, 28, 30, 32, 34, 36, 38, 40, 42, 44, 46, 48, 50, 52, 54, 56, 58, 60, 62, 64, 66, 68, 70, 72, 74, 76, 78, 80, 82, 84, 86, 88, 90, 92, 94, 96, 98, 100, 102, 104, or 106, or a complement thereof, under moderate to highly stringent conditions.

[0013] The disclosure also provides an isolated polynucleotide encoding a polypeptide comprising the amino acid sequence represented by SEQ ID NO: 5, 7, 9, 11, 13, 15, 17, 19, 21, 23, 25, 27, 29, 31, 33, 35, 37, 39, 41, 43, 45, 47, 49, 51, 53, 55, 57, 59, 61, 63, 65, 67, 69, 71, 73, 75, 77, 79, 81, 83, 85, 87, 89, 91, 93, 95, 97, 99, 101, 103, 105 and 107 containing up to 30 conservative amino acid substitutions.

[0014] The disclosure provides an isolated polynucleotide comprising the nucleotide sequence represented by SEQ ID NO: 2, 4, 6, 8, 10, 12, 14, 16, 18, 20, 22, 24, 26, 28, 30, 32, 34, 36, 38, 40, 42, 44, 46, 48, 50, 52, 54, 56, 58, 60, 62, 64, 66, 68, 70, 72, 74, 76, 78, 80, 82, 84, 86, 88, 90, 92, 94, 96, 98, 100, 102, 104, or 106.

[0015] The disclosure also provides a method for producing a silk dragline, the method comprising culturing the recombinant host cell of the disclosure under conditions suitable for expression of the polypeptide, such that the polypeptide is produced.

[0016] The details of one or more embodiments of the disclosure are set forth in the accompanying drawings and the description below. Other features, objects, and advantages of the disclosure will be apparent from the description and drawings, and from the claims.

### BRIEF DESCRIPTION OF THE DRAWINGS

[0017] FIG. 1 shows a phylogeny for spider groups analyzed in the present disclosure. Phylogeny is based on Coddington and Levi (1991) and Hedin and Bond (2006).

[0018] FIG. 2A-B show (A) a schematic of alignment of Latrodectus hesperus Egg Case Proteins and Liphistius malayanus Egg Case Protein-like proteins. (B) An alignment of amino acids sequences, abbreviated using single letters. Only partial Latrodectus (Latr) ECPs are shown as Liphistius (Lipp) ECPLs lack the extended repetitive region. Alignment columns were highlighted using GeneDoc (Nicholas and Nicholas, 1997) according to physiochemical properties. Upper-case single letters occur above alignment positions showing 100% amino acid conservation, while lower case single letters occur above positions showing >50% conservation.

[0019] FIG. 3 shows a spidroin gene tree based on ML analysis of carboxy-terminal encoding region with gaps coded as binary characters and monophyly of some groups constrained. Numbers next to nodes and terminals correspond to numbers in tables S1 and S2 showing support values, alternate rootings, and continuous character data. Black circles indicate duplication events inferred by reconciliation. Branches are colored according to spidroin consensus repeat length using the combination of long repeat lengths for Hypochilus fib2 and Plectreurys fib3. Ancestral state parsimony optimization was determined by Mesquite v. 2.74. Bin ranges were determined by natural gaps in the distribution of repeat lengths for terminal and reconstructed internal nodes. Hash marks on branch indicate arbitrary shortening of branch for figure quality purposes. Brackets indicate clades with the following abbreviations: Me=Mesothelae, My=Mygalomorphae, Ar=Araneomorphae, AcSp=Aciniform, TuSp=Tubuliform, PySp=Pyriform, MaSp=Major ampullate, MiSp=Minor ampullate, Flag=Flagelliform.

[0020] FIG. 4 shows majority rule consensus of ensemble repeats within spidroins. Ensemble repeats are tandemly arrayed. Amino acid sequences with single letter abbreviations are shown. Alanine, serine, and glycine are highlighted. Single amino acids repeated in tandem are underlined.

[0021] FIG. 5 shows a heat map of percent compositions of alanine, glycine, and serine from spidroin repetitive regions. Cladogram adjacent to heat map shows relationships as in FIG. 3. Hexura fib1 was omitted since no repetitive region sequence was obtained for that cDNA. Histograms on columns also show relative composition levels of the three amino acids across spidroins. Abbreviations for Glade names are as in FIG. 3.

[0022] FIG. 6 shows an alignment of DNA sequences for Liphistius fib1 repeats. Amino acid translation and DNA consensus sequences are above repeat sequences. Dots indicate identity to the consensus sequence. Non-synonymous and synonymous differences from the consensus are indicated by upper and lower case letters, respectively.

[0023] FIG. 7 depicts a spidroin gene tree based on ML analysis of carboxy-terminal encoding region with gaps coded as binary characters and monophyly of some groups constrained. Numbers at nodes correspond to node numbers in supplementary tables 1 and 2. Node numbers indicated in red are constrained nodes. Green dots indicate nodes that do not conflict between the analysis with node constraints and the unconstrained ML analysis. Dots at terminal nodes indicate web type constructed by the taxa from which the spidroin sequence was obtained (red=trapdoor, blue=sheetweb, purple=purseweb, teal=turret). Hash marks on branch indicate arbitrary shortening of branch for figure quality purposes. Abbreviations for Glade names are as in FIG. 3.

[0024] FIG. 8 shows a schematic of the domains (N-terminal, repeat, and C-terminal) present in the particular sequences.

[0025] FIG. 9A-D shows the polyucleotide (SEQ ID NO:4) and polypeptide (SEQ ID NO:5) sequence of a silk protein of the disclosure.

[0026] FIG. 10A-G shows the polyucleotide (SEQ ID NO:6) and polypeptide (SEQ ID NO:7) sequence of a silk protein of the disclosure.

### DETAILED DESCRIPTION

[0027] As used herein and in the appended claims, the singular forms “a,” “and,” and “the” include plural referents unless the context clearly dictates otherwise. Thus, for example, reference to “protein” includes a plurality of such proteins and reference to “the peptide” includes reference to one or more peptides known to those skilled in the art, and so forth.

[0028] Also, the use of “or” means “and/or” unless stated otherwise. Similarly, “comprise,” “comprises,” “comprising” “include,” “includes,” and “including” are interchangeable and not intended to be limiting.

[0029] It is to be further understood that where descriptions of various embodiments use the term “comprising,” those skilled in the art would understand that in some specific instances, an embodiment can be alternatively described using language “consisting essentially of” or “consisting of:”

[0030] Unless defined otherwise, all technical and scientific terms used herein have the same meaning as commonly understood to one of ordinary skill in the art to which this disclosure belongs. Although methods and materials similar or equivalent to those described herein can be used in the practice of the disclosed methods and compositions, the exemplary methods, devices and materials are described herein.

[0031] The publications discussed above and throughout the text are provided solely for their disclosure prior to the filing date of the present application. Nothing herein is to be construed as an admission that the inventors are not entitled to antedate such disclosure by virtue of prior disclosure.

[0032] Spider silks have been demonstrated to have several desirable characteristics. The orb-web-spinning spiders can produce silk from six different types of glands. Each of the six fibers has different mechanical properties. However, they all have several features in common. They are (i) composed predominantly or completely of protein; (ii) undergo a transition from a soluble to an insoluble form that is virtually irreversible; and (iii) composed of amino acids dominated by alanine, serine, and glycine and have substantial quantities of other amino acids, such as glutamine, tyrosine, leucine, and valine. The spider dragline silk fiber has been proposed to consist of pseudocrystalline regions of antiparallel, 3-sheet structure interspersed with elastic amorphous segments.

[0033] The spider silks range from those displaying a tensile strength greater than steel (7.8 vs 3.4 G/denier) and those with elasticity greater than wool, to others characterized by energy-to-break limits that are greater than KEVLAR®. Given these characteristics spider silk could be used as a light-weight, high strength fiber for various textile applications.

[0034] Spider dragline silk has a number of unusual properties similar to other spider silks. These include a tensile strength greater than steel or carbon fibers (200 ksi), elasticity as great as some nylon (35%), a stiffness as low as silk (0.6 msi), and the ability to supercontract in water (up to 60% decrease in length). These properties are unmatched by any other material.

[0035] When spun into fibers, which can be done by dissolving spider silk in an appropriate solvent and forcing it through a small orifice, spider silk can have numerous uses. For example, one large volume use is for clothing. Silk with elasticity would have a unique place in the market even at high prices. It may also be applicable for certain kinds of high strength uses such as rope, surgical sutures, flexible tie downs for certain electrical components and even as a biomaterial for implantation (e.g., artificial ligaments or aortic banding). Thus, there are numerous applications including high-tech clothing, rope, sutures, medical coverings and others where various combinations of strength and elasticity are required. It is also possible to modify the properties of the silk fibers by altering the protein sequence.

[0036] However, even in view of the desirable uses, considerable difficulty has been encountered in attempting to solubilize and purify natural spider silk while retaining the molecular-weight integrity of the fiber. Spider silk fibers are insoluble except in very harsh agents such as LiSCN, LiClO₄, or 88% (vol/vol) formic acid. Once dissolved, the protein precipitates if dialyzed or if diluted with typical buffers. Another disadvantage of spider silk protein is that only small amounts are available from cultivated spiders, making commercially useful quantities of silk protein unattainable at a reasonable cost. Additionally, multiple forms of spider silks are produced simultaneously by any given spider. The resulting mixture has less application than a single isolated silk because the different spider-silk proteins have different properties and, due to solubilization problems, are not easily separated by methods based on their physical characteristics. Hence the prospect of producing commercial quantities of spider silk from natural sources has not previously been a practical one and there remains a need for an alternate mode of production. The technology of recombinant genetics provides one such mode.

[0037] By the use of recombinant molecular biology techniques it is now possible to transfer polynucleotides between different organisms for the purposes of expressing desired proteins in commercially useful quantities. Such transfer usually involves joining appropriate polynucleotides to a vector molecule, which is then introduced into a host cell or organism by transformation or transfection. Transformants are selected by a known marker on the vector, or by a genetic or biochemical screen to identify the cloned fragment. Vectors contain sequences that enable autonomous replication within the host cell, or allow integration into a chromosome in the host.

[0038] Progress has been made in the cloning and expression of spider silk proteins, Xu et al. (Proc. Natl, Acad. Sci. U.S.A., 87, 7120, (1990)) report the determination of the sequence for a portion of the repetitive sequence of a dragline silk protein from spider Nephila clavipes, based on a partial cDNA clone. The repeating unit is a maximum of 34 amino acids long and is not rigidly conserved. The repeat unit is composed of two different segments: (i) a 10 amino acid segment dominated by a polyalanine sequence of 5-7 residues; (ii) a 24 amino acid segment that is conserved in sequence but has deletions of multiples of 3 amino acids in many of the repeats. The latter sequence consists predominantly of GlyXₐₐGly motifs, with Xₐₐ being alanine, tyrosine, leucine, or glutamine (SEQ ID NO:1). The codon usage for this DNA is highly selective, avoiding the use of cytosine or guanine in the third position.

[0039] Hinman and Lewis (J. Biol. Chem. 267, 19320 (1992)) report the sequence of a partial cDNA clone encoding a portion of the repeating sequence of a second fibroin protein from dragline silk of Nephila clavipes. The repeating unit is a maximum of 51 amino acids long and is also not rigidly conserved.

[0040] The vast majority of spider silk knowledge is based on orb-weaving spiders. To extend the breadth of knowledge, silk cDNA transcripts and genes were characterized from non-orb-weaving spiders. Specifically, from Mesothelae (segmented spiders) and Mygalomorphae (e.g., tarantulas and trap door spiders). These sequences reported here belong to the spidroin and egg case protein gene families. Spidroins (contraction of “spider fibroin”) are the structural proteins that compose spider silk fibers. Egg case proteins are another type of structural proteins that, until now, were only known from the Latrodectus hesperus (Western black widow). The silk sequences provided herein provide insight as to how to designing silks using serine-rich motifs. By contrast, the widely studied major ampullate (dragline) silks of orb-weavers are glycine-rich. Mesothele and Mygalomorphae silks have desirable properties such as water resistance, microbial resistance, and able to persist in the environment for long periods of time.

[0041] While most silk research has been focused on derived members of Araneomorphae (“true spiders”), this disclosure provides silk genes from Paleocribelletae (a basal araneomorph Glade), increase sampling for Mygalomorphae (trapdoor spiders, tarantulas, and their kin; the sister group to Araneomorphae), and for the first time record silk sequences from Mesothelae (segmented spiders; the sister suborder to all other spiders) (Coddington and Levi, 1991). Mesotheles and Mygalomorphs exhibit profound differences in silk use compared to most araneomorph spiders (Coyle, 1986; Haupt, 2003). Mesotheles and Mygalomorphs produce general-purpose fibers and apply silk in a sheet-like manner to a burrow or other substrate, which is believed to be most similar to silk use in the common ancestor of extant spiders that lived >380 million years ago (Shear et al., 1989; Coddington and Levi, 1991; Haupt and Kovoor, 1993; Foelix, 1996; Vollrath and Selden, 2007; Ayoub et al., 2007a; Ayoub and Hayashi, 2009; Blackledge et al., 2009).

[0042] Full-length and extensive partial-length silk gene sequences were obtained from large-insert genomic DNA libraries for Latrodectus hesperus (Western Black Widow) and Argiope argentata (silver garden orb-weaver). The cDNA and genomic DNA derived sequences reported in this disclosure represent previously uncharacterized gene regions. Full length and near full-length sequences were determined for minor ampullate silk genes (web construction silk) and aciniform gland silk genes. The minor ampullate genes contain “spacer” regions, which are segments that disrupt the highly repetitive, alanine and glycine rich motifs that compose the bulk of the spidroin. Knowledge of the spacer sequences, their frequency, and spatial distribution within a silk protein are useful for successfully replicating minor ampullate silk. Also, the spacer sequences can be targeted for modification (such as for introducing tags or novel functional groups), while maintaining the tensile strength conferred by the surrounding glycine and alanine rich repetitive motifs. The aciniform silk sequences are the first complete gene sequences for one of the toughest spider silks ever characterized. Aciniform silk is used to wrap prey and to cushion the inside of egg sacs. Thus, these silk gene sequences provide key information for the design of biomaterials with desirable properties such as high toughness, resistance to degradation, being proteinaceous, and non-antigenic.

[0043] As used herein an “spidroin polypeptide” means a polypeptide that contains or comprises an amino acid sequence as set forth in SEQ ID NOs: 3, 5, 7, 9, 11, 13, 15, 17, 19, 21, 23, 25, 27, 29, 31, 33, 35, 37, 39, 41, 43, 45, 47, 49, 51, 53, 55, 57, 59, 61, 63, 65, 67, 69, 71, 73, 75, 77, 79, 81, 83, 85, 87, 89, 91, 93, 95, 97, 99, 101, 103, 105 or 107; polypeptides having substantial homology or substantial identity to the sequences set forth in SEQ ID Nos: 3, 5, 7, 9, 11, 13, 15, 17, 19, 21, 23, 25, 27, 29, 31, 33, 35, 37, 39, 41, 43, 45, 47, 49, 51, 53, 55, 57, 59, 61, 63, 65, 67, 69, 71, 73, 75, 77, 79, 81, 83, 85, 87, 89, 91, 93, 95, 97, 99, 101, 103, 105 or 107; polypeptides comprising from 1-50 (e.g., from 1-40, 1-30, 1-20, 1-15 or 1-10 conservative amino acid substitutions to any of the foregoing sequences; fragments of the foregoing sequences; and conservative and naturally occurring variants of the foregoing, wherein the polypeptide comprises a spider silk structure. The disclosure provides polypeptides having a sequence as set forth in SEQ ID Nos: 3, 5, 7, 9, 11, 13, 15, 17, 19, 21, 23, 25, 27, 29, 31, 33, 35, 37, 39, 41, 43, 45, 47, 49, 51, 53, 55, 57, 59, 61, 63, 65, 67, 69, 71, 73, 75, 77, 79, 81, 83, 85, 87, 89, 91, 93, 95, 97, 99, 101, 103, 105 or 107 alone or fused to a second polypeptide.

[0044] A polypeptide of the disclosure encompasses an amino acid sequence that has a sufficient or a substantial degree of identity or similarity to a sequence set forth in SEQ ID NOs: 3, 5, 7, 9, 11, 13, 15, 17, 19, 21, 23, 25, 27, 29, 31, 33, 35, 37, 39, 41, 43, 45, 47, 49, 51, 53, 55, 57, 59, 61, 63, 65, 67, 69, 71, 73, 75, 77, 79, 81, 83, 85, 87, 89, 91, 93, 95, 97, 99, 101, 103, 105 or 107. Substantially identical sequences can be identified by those of skill in the art as having structural domains and/or having biological activity in common with Spidroin polypeptides. Methods of determining similarity or identity may employ computer algorithms such as, e.g., BLAST, FASTA, and the like.

[0045] Polypeptides of the disclosure may be modified by any type of alteration (e.g., insertions, deletions, or substitutions of amino acids; changes in the state of glycosylation of the polypeptide; refolding or isomerization to change its three-dimensional structure or self-association state; and changes to its association with other polypeptides or molecules) are also encompassed by the disclosure. Therefore, the polypeptides provided by the disclosure include polypeptides characterized by amino acid sequences similar to those as set forth in SEQ ID NOs: 3, 5, 7, 9, 11, 13, 15, 17, 19, 21, 23, 25, 27, 29, 31, 33, 35, 37, 39, 41, 43, 45, 47, 49, 51, 53, 55, 57, 59, 61, 63, 65, 67, 69, 71, 73, 75, 77, 79, 81, 83, 85, 87, 89, 91, 93, 95, 97, 99, 101, 103, 105 or 107, but into which modifications are naturally provided or deliberately engineered. A polypeptide that shares biological activities in common with a polypeptide comprising a sequence as set forth in SEQ ID NOs: 3, 5, 7, 9, 11, 13, 15, 17, 19, 21, 23, 25, 27, 29, 31, 33, 35, 37, 39, 41, 43, 45, 47, 49, 51, 53, 55, 57, 59, 61, 63, 65, 67, 69, 71, 73, 75, 77, 79, 81, 83, 85, 87, 89, 91, 93, 95, 97, 99, 101, 103, 105 or 107 having silk dragline characteristics or activity are encompassed by the disclosure.

[0046] The disclosure encompasses various forms of spidroin polypeptides that retain at least one activity or characteristic (“silk dragline characteristics”) selected from the group consisting (i) distinct structural units; and (ii) repeat units of a general structure comprising glycine and alanine rich regions separated by a spacer. For example, SEQ ID NO:5 comprises a full-length sequence comprising N-terminal and C-terminal regions that are optimzed to work with each other and with the repetitive regions therebetween. The repetitive region of minor ampullate silk is rich in glycine (G) and alanine (A), in regions of iterated A's (poly-A) and GA couplets. GGY and GQ motifs are also prevalent. These G and A rich regions are usually interrupted every-200-500 amino acids by a “spacer” region. The spacer regions of cob-web weavers are highly conserved in sequence and length. Adjacent −400 amino acid long G and A rich sequence and −28 amino acid long spacer form an ensemble repeat unit.

[0047] A typical structure for minor ampullate silk, taken from the middle of SEQ ID NO:5 is set forth below (corresponding to SEQ ID NO:5 from amino acid 1005-1384):

AASASGAVSTSAAAGYGQGAGTGAGGYGQGAGGYGQRAGAAAGGYGQGSG
GYGQGVGTAASVAAGGAGAGGYGLGAGGYGRGAGAAAGSGAGGYGQGAGG
YGQGAGAAAGAGAGGYGQGAGGYGQGAGAAASVAAGGAGAGGYGLGAGGY
GRGAGAGAGAAAGSGAGGYSQGAGGYGQRGGAAAGAAAGGAGSGGYGLGA
GIGAGAAAIAGGYGQGAGGYKQGAGAAAGAGTGAGGYGQGAGGYGQGAGA
AAGASAGAIAGGYGQGAVGYGQGTGGYGQGAAAGAGTGAGGYGQGAGGYG
QATGVGSYGQGTGDGARGPAGYGQGAGVGTIGAVGYGQGQTAGASSSTAA
GAASTGYTERQNEVTTTVSTTRKETADRRQ

Depicted is an alanine/glycine rich region followed by the spacer (the spacer region is underlined). The spacer region is highly conserved in sequence and length.

[0048] Thus, in one embodiment, the disclosure provides an isolated polypeptide comprising a sequence of SEQ ID NO:5 from position 1358-1384. For example, Scheme I, below, demonstrates the conservative nature of the spacer region across SEQ ID NOs: 3, 5, 73, 77 and 79.

| | |
|---|---|
| Consensus | SSTGYTERQNEVVTTVTTTRQETAD1RQ |
| | where 1 = Y/R |
| Seq 3 | SSTGYTERQNEVVTTVTTTRQETADYAQKQ |
| Seq 5 | SSTGYTERQNEVVTTVTTTRQEIADRRQ |
| Seq 5 | SSTGYTERQNEVVTTVTTTRQEIADRRQ |
| Seq 5 | ASTGYTERQNEVTTTVSTTRKETADRRQ |
| Seq 5 | SSTGYAGRQNEVITTVTTTRQETADYANKQ |
| Seq 73 | AGYTQRQNEVITTVSTTRQETADYGQKQ |
| Seq 73 | SGYTQKQNEVITTVSTTRQKIADYGQKQ |
| Seq 73 | SGYTQKQNEVITTVSTTRQKIADYGQKQ |
| Seq 73 | SGYTQRQNEVITTVSTTRQKTADYGQKQ |
| Seq 73 | SGYTQRQNEVITTVSTTRQKTADYGQKQ |
| Seq 73 | SGYIQKQNEVITTVSTTRQETADYGRKQ |
| Seq 77 | SSTGYTERQNEVVTTVTTTRQETADRRQ |
| Seq 77 | SSTGYTERQNEVVTSVTSTRQETADRRQ |
| Seq 77 | SSTGYTERQNEVITTVTTTRQETADQRQ |
| Seq 77 | SATGYTERQNEVVTTVTTTRQETADRRQ |
| Seq 77 | SSTGYTERQNEVVTTVTSTRQETADRRQ |
| Seq 77 | SATGYTERQNEVVTTVTTTRQETADRRQ |
| Seq 77 | SSTGYTERQNEVVTTVTSTRQETADRRQ |
| Seq 79 | SSTGYTERQNEVVTTVTTTRQESADYARKQ |

Scheme I, conserved nature of spacer sequences (multiple spacer are present in SEQ ID NOs: 5, 73, and 77).

[0049] In a further embodiment, the isolated polypeptide can comprise the sequence of SEQ ID NO:5 from position 1358-1384 and be preceded and/or followed by a glycine and alanine rich region. In yet still a further embodiment, the polypeptide can comprise an N-terminus sequence that is about 80-150 amino acids in length and having at least about 90% identity to SEQ ID NO:5 from amino acid position 71 to 151. The polypeptide can yet further comprise a C-terminal region of about 50-100 amino acids in length and having at least about 90% identity to SEQ ID NO:5 from position 2085 to 2141. For example, SEQ ID NOs: 3, 5, 73, 75, 77, 79, 81 and 83 contain all or parts of such structural motifs (see also FIG. 8). A polypeptide according to the foregoing will have biological characteristics including mechanical properties approximately the same or better than Latrodectus hesperus polypeptide of SEQ ID NO:5. For example, a polypeptide comprising a sequence of SEQ ID NO:5 from position 1358-1384 and be preceded and/or followed by a glycine and alanine rich region, having an N-terminus sequence that is about 80-150 amino acids in length and having at least about 90% identity to SEQ ID NO:5 from amino acid position 71 to 151 and a C-terminal region of about 50-100 amino acids in length and having at least about 90% identity to SEQ ID NO:5 from position 2085 to 2141, will have a Young's modulus of about 3.94 GPa, an Ultimate Strength of about 139 MPa, an Extensibility of about 0.818 mm/mm and a Toughness of about 66.7 MPa.

[0050] In yet another embodiment, the disclosure provides a silk polypeptide comprising a conserved N-terminal region of about 165 amino acids. Identical amino acids SEQ ID NO:7 and 87 are indicated in bold.

SEQ ID NO: 7
MNWLTSLSLIFILAFVQNVQVEGRKGHHHSSGSSKSPWANPAKANAFMKC
LIQKIS
SEQ ID NO: 87
MNWLPTLAFAILLL---SVQYDAVQSASTLS---RSPWANPAKAGSLMNC
LMSRIA
SEQ ID NO: 7
TSPVFPQQEKEDMEEIVETMMSAFSSMSTSGGSNAAKLQAMNMAFASSMA
ELVIAE
SEQ ID NO: 87
SSNVLPQQDKEDLESIMDTLMSAIKGASAKGKSSAAQLQAINMAVASSLA
EIVVAE
SEQ ID NO: 7
DADNPDSISIKTEALAKSLQQCFKSTLGSVNRHFIAEIKDLIGMFAREAA
AM-EEA
SEQ ID NO: 87
DAGNQASIAVKTQALTGALGQCFQAVMGTVDRKFINEINDLITMFAKEAA
SESNEI

The N-terminal region is followed by a repetitive region comprising extremely conserved repeats that are tandemly arrayed. In SEQ ID NO: 7 (from Western black widow), the repeat is about 370 amino acids long and there are 16 repeats in the repetitive region. In SEQ ID NO:87 (from the silver garden spider), the repeat is about 200 amino acids long and there are 20 repeats in the repetitive region. SEQ ID NO:7 and 87 can be characterized as (a) having repeat units that are hundreds of amino acids in length, (b) having extreme sequence conservation of repeats within a spidroins, at both the amino acid and nucleotide levels, (c) unlike most arthropod silks that are mostly Glycine, Alanine, and Serine, aciniform repeats contain numerous different amino acids, (d) the repeats are complex and cannot be explained by the few simple motifs common to other spider silks, such as poly-Alanine, Glycine-Alanine couplets, and (e) the immense length of the repetitive region makes aciniform spidroins the largest known spidroins (SEQ ID NO:7 has 6333 amino acids, 630 kiloDaltons predicted molecular weight; and SEQ ID NO:87 has 4479 amino acids and has a predicted molecular weight of 430 kiloDaltons). SEQ ID NO:87 repeat unit is almost half the length of the repeat length of SEQ ID NO:7 (200 vs. 370 amino acids). SEQ ID NO:87 repeat unit cannot be subdivided. However, the SEQ ID NO:7 repeat unit can be subdivided in half, a part A and a part B. Below is an exemplar repeat unit from SEQ ID NO:7. Non-underlined sequence corresponds to part A and underlined sequence corresponds to part B. The entire repeat unit (part A and part B) is tandem arrayed 16 times in the complete sequence.

FGGPSAGGDVAAKLARSLASTLASSGVFRAAFNSRVSTPVAVQLTDALVQ
KIASNLGLDYATASKLRKASQAVSKVRMGSDTNAYALAISSALAEVLLSS
GKVADANINQIAPQLASGIVLGVSTAAPQFGVDLSSINVNLDISNVARNM
QASIQGGPAPITAEGPDFGAGYPGGAPTDLSGLDMGAPSDGSRGGDATAK
LLQALVPALLKSDVFRAIYKRGTRKQVVQYVTNSALQQAASSLGLDASTI
SQLQTKATQALSSVSADSDSTAYAKAFGLAIAQVLGTSGQVNDANVNQIG
AKLATGILRGSSAVAPRLGIDLSGINVDSDIGSVTSLILSGSTLQMTIPA
GGDDLSGGYPGGFPAGAQPSGGAPVD
(Domain of SEQ ID NO: 7)

The repeat region is followed by a conserved C-terminal region. The conserved C-terminal region of the aciniform spidroins encoded by SEQ ID NOs:7 and 87 is about 100 amino acids long. Below is an alignment of the C-terminal regions. Identities are indicated by bold.

SEQ ID NO: 7
QGLKSPQASSRINRLSSSVVNALGPNGLDINNFSDGLRTTLSQLSSSGLS
SEQ ID NO: 87
VGLRSGSAASRIRQLTSSVTNAVGPNGVDANALARSLQSSFSNLRSSGMS
SEQ ID NO: 7
KKEAAIETLMEAMVALLQVLNSAQVNQVDTSSTVVTSSSLAKALSS-LF
SEQ ID NO: 87
SSDAKIEVLLETIVSLLQLLSNTQIRGVNPATASSVANSAARSFELVLA

[0051] Accordingly, the disclosure provides a polypeptide comprising an N-terminal region that is at least 60% identical to SEQ ID NO:7 from amino acid 1 to about 167, followed by a tandem array of 16-20 repeat units of about 200-370 amino acid in length and having a C-terminal domain comprising at least 40% identity to SEQ ID NO:7 from about amino acid 6236 to 6333. In a further embodiment, the polypeptide is about 4400-6300 amino acids in length and about 430 to about 630 kiloDaltons in molecular weight. The polypeptide has one or more silk-like characteristics including, but not limited to having a stress, strain and toughness approximately equal to the wild-type sequence isolated from Latrodectus Hesperus. For example, a polypeptide of the disclosure comprising an N-terminal region that is at least 60% identical to SEQ ID NO:7 from amino acid 1 to about 167, followed by a tandem array of 16-20 repeat units of about 200-370 amino acid in length and having a C-terminal domain comprising at least 40% identity to SEQ ID NO:7 from about amino acid 6236 to 6333 will have a Young's modulus of about 9.8 to 10.4 GPa, Ultimate strength of about 636 to 687 MPa, an Extensibility of about 0.505 to 0.83 mm/mm and a Toughness of about 230 MPa to 376 MPa.

[0052] As used herein a “unit repeat” constitutes a repetitive short or long sequence. Thus, in one embodiment a structural feature of the spider silk proteins can be considered to consist of a series of small variations of a unit repeat. The unit repeats in the naturally occurring proteins are often distinct from each other. That is, there is little or no exact duplication of the unit repeats along the length of the protein. Synthetic spider silks, however, can be made wherein the primary structure of the protein comprises a number of exact repetitions of a single unit repeat. Additional synthetic spider silks can be synthesized which comprise a number of repetitions of one unit repeat together with a number of repetitions of a second unit repeat. Such a structure would be similar to a typical block copolymer. Unit repeats of several different sequences can also be combined to provide a synthetic spider silk protein having properties suited to a particular application. The term “direct repeat” as used herein is a repeat in tandem (head-to-tail arrangement) with a similar repeat that may be directly adjacent of separated by 5-10 amino acids.

[0053] The disclosure provides partial, full-length and mature forms spidroin polypeptides. The polypeptide and polynucleotides of the disclosure were identified from various spider families as set forth below. Full-length polypeptides are those having the complete primary amino acid sequence of the polypeptide as initially translated. The amino acid sequences of full-length polypeptides can be obtained, for example, by translation of the complete open reading frame (“ORF”) of a cDNA molecule. Several full-length polypeptides may be encoded by a single genetic locus if multiple mRNA forms are produced from that locus by alternative splicing or by the use of multiple translation initiation sites. The “mature form” of a polypeptide refers to a polypeptide that has undergone post-translational processing steps, if any, such as, for example, cleavage of the signal sequence or proteolytic cleavage to remove a prodomain. Multiple mature forms of a particular full-length polypeptide may be produced, for example, by imprecise cleavage of the signal sequence, or by differential regulation of proteases that cleave the polypeptide. The mature form(s) of such polypeptide may be obtained by expression, in a suitable insect or mammalian cell or other host cell, of a polynucleotide that encodes the full-length polypeptide. The sequence of the mature form of the polypeptide may also be determinable from the amino acid sequence of the full-length form, through identification of signal sequences or protease cleavage sites. The spidroin polypeptides of the disclosure also include polypeptides that result from post-transcriptional or post-translational processing events such as alternate mRNA processing which can yield a truncated but biologically active polypeptide. Also encompassed within the disclosure are variations attributable to proteolysis such as differences in the N- or C-termini upon expression in different types of host cells, due to proteolytic removal of one or more terminal amino acids from the polypeptide (generally from 1-5 terminal amino acids).

[0054] A polypeptide of the disclosure may be prepared by culturing transformed or recombinant host cells under culture conditions suitable to express a polypeptide of the disclosure. The resulting expressed polypeptide may then be purified from such culture using known purification processes. The purification of the polypeptide may also include an affinity column containing agents which will bind to the polypeptide; one or more column steps over such affinity resins as concanavalin A-agarose, Heparin-Toyopearl® or Cibacrom blue 3GA Sepharose®; one or more steps involving hydrophobic interaction chromatography using such resins as phenyl ether, butyl ether, or propyl ether; or immunoaffinity chromatography. Alternatively, the polypeptide of the disclosure may also be expressed in a form that will facilitate purification. For example, it may be expressed as a fusion polypeptide, such as those of maltose binding polypeptide (MBP), glutathione-5-transferase (GST) or thioredoxin (TRX). Kits for expression and purification of such fusion polypeptides are commercially available from New England BioLab (Beverly, Mass.), Pharmacia (Piscataway, N.J.), and Invitrogen, respectively. The polypeptide can also be tagged with an epitope and subsequently purified by using a specific antibody directed to such epitope. Finally, one or more reverse-phase high performance liquid chromatography (RP-HPLC) steps employing hydrophobic RP-HPLC media, e.g., silica gel having pendant methyl or other aliphatic groups, can be employed to further purify the polypeptide. Some or all of the foregoing purification steps, in various combinations, can also be employed to provide a substantially homogeneous recombinant polypeptide. The polypeptide thus purified is substantially free of other insect, plant, bacterial or mammalian polypeptides and is defined in accordance with the disclosure as a “substantially purified polypeptide”; such purified polypeptides include fragment, variant, and the like. A polypeptide of the disclosure may also be expressed as a product of transgenic animals or insects, which are characterized by somatic or germ cells containing a polynucleotide encoding a polypeptide of the disclosure.

[0055] It is also possible to utilize an affinity column such as a monoclonal antibody generated against polypeptides of the disclosure, to affinity-purify expressed polypeptides. These polypeptides can be removed from an affinity column using conventional techniques, e.g., in a high salt elution buffer and then dialyzed into a lower salt buffer for use or by changing pH or other components depending on the affinity matrix utilized, or be competitively removed using the naturally occurring substrate of the affinity moiety, such as a polypeptide derived from the disclosure. In this aspect of the disclosure, proteins that bind a polypeptide of the disclosure (e.g., an antibody of the disclosure) can be bound to a solid phase support or a similar substrate suitable for identifying, separating, or purifying cells that express polypeptides of the disclosure on their surface. Adherence of, for example, an antibody of the disclosure to a solid phase surface can be accomplished by any means, for example, magnetic microspheres can be coated with these polypeptide-binding proteins and held in the incubation vessel through a magnetic field.

[0056] A polypeptide of the disclosure may also be produced by known conventional chemical synthesis. Methods for constructing the polypeptides of the disclosure by synthetic means are known to those skilled in the art. The synthetically-constructed polypeptide sequences, by virtue of sharing primary, secondary or tertiary structural and/or conformational characteristics with native polypeptides may possess biological properties in common therewith, including biological activity.

[0057] The desired degree of purity depends on the intended use of the polypeptide. A relatively high degree of purity is desired when the polypeptide is to be administered in vivo, for example. In such a case, the polypeptides are purified such that no polypeptide bands corresponding to other polypeptides are detectable upon analysis by SDS-polyacrylamide gel electrophoresis (SDS-PAGE). It will be recognized by one skilled in the pertinent field that multiple bands corresponding to the polypeptide can be visualized by SDS-PAGE, due to differential glycosylation, differential post-translational processing, and the like. Typically, the polypeptide of the disclosure is purified to substantial homogeneity, as indicated by a single polypeptide band upon analysis by SDS-PAGE. The polypeptide band can be visualized by silver staining, Coomassie blue staining, or (if the polypeptide is radiolabeled) by autoradiography.

[0058] Species homologues of spidroin polypeptides and polynucleotides of the disclosure encoding the polypeptides are also provided by the disclosure. As used herein, a “species homologue” is a polypeptide or polynucleotide with a different species of origin from that of a given polypeptide or polynucleotide, but with significant sequence similarity to the given polypeptide or polynucleotide. Species homologues may be isolated and identified by making suitable probes or primers from polynucleotides encoding the polypeptides provided herein and screening a suitable nucleic acid source from the desired species. Alternatively, homologues may be identified by screening a genome database containing sequences from one or more species utilizing a sequence (e.g., nucleic acid or amino acid sequence) of a spidroin polypeptide of the disclosure. Such genome databases are readily available for a number of species (e.g., on the world wide web (www) at tigr.org/tdb; genetics.wisc.edu; stanford.edu/.about.ball; hiv-web.lanl.gov; ncbi.nlm.nig.gov; ebi.ac.uk; and pasteur.fr/other/biology).

[0059] Intermediate Sequence Search (ISS) can be used to identify closely related as well as distant homologs by connecting two proteins through one or more intermediate sequences. ISS repetitively uses the results of the previous query as new search seeds. Saturated BLAST is a package that performs ISS. Starting with a protein sequence, Saturated BLAST runs a BLAST search and identifies representative sequences for the next generation of searches. The procedure is run until convergence or until some predefined criteria are met. Saturated BLAST is available on the world wide web (www) at: bioinformatics.burnham-inst.org/xblast (see also, Li et al. Bioinformatics 16(12): 1105, 2000).

[0060] Fragments of the Spidroin polypeptides of the disclosure are encompassed by the disclosure. Peptide fragments of Spidroin polypeptides of the disclosure, and polynucleotides encoding such fragments include amino acid or nucleotide sequence lengths that are at least 25% (typically at least 50%, 60%, or 70%, and commonly at least 80%) of the length of a spidroin polypeptide or polynucleotide of the disclosure. Typically such sequences will have at least 60% sequence identity (more typically at least 70%-75%, 80%-85%, 90%-95%, at least 97.5%, or at least 99%, and most commonly at least 99.5%) with spidroin polypeptide or polynucleotide of the disclosure when aligned so as to maximize overlap and identity while minimizing sequence gaps. Also included in the disclosure are polypeptides, peptide fragments, and polynucleotides encoding them, that contain or encode a segment comprising at least 8 to 10, typically at least 20, at least 30, or most commonly at least 40 contiguous amino acids. Such polypeptides and fragments may also contain a segment that shares at least 70% (at least 75%, 80%-85%, 90%-95%, at least 97.5%, or at least 99%, and commonly at least 99.5%) with any such segment of any of the Spidroin family of polypeptides, when aligned so as to maximize overlap and identity while minimizing sequence gaps. Visual inspection, mathematical calculation, or computer algorithms can determine the percent identity.

[0061] Certain spidroin polypeptides of the disclosure are composed of a small suite of amino acid sequence motifs, such as GGX and poly-A, which are repeated many times throughout the polypeptide. The amino acid sequence of a fragment these spidroins is repetitive and rich in glycine, but is otherwise unlike any previously known amino acid sequence. Consensus repeat domains comprise:

| | |
|---|---|
| GGYGQGAGGYGQGAGXaa₁A | (SEQ ID NO: 108) |

where Xaa1 is S or A residues.

[0062] The polypeptides of the disclosure can be made by direct synthesis or by expression from cloned polynucleotide of the disclosure. Means for expressing cloned polynucleotides are described herein and are generally known in the art. The following considerations are recommended for the design of expression vectors used to express polynucleotides encoding the spider silk polypeptides of the disclosure.

[0063] Because spider silk proteins are highly repetitive in their structure, cloned polynucleotides should be propagated and expressed in host cell strains that can maintain repetitive sequences in extrachromosomal elements. The prevalence of specific amino acids (e.g., alanine, glycine, proline, and glutamine) also suggests that it might be advantageous to use a host cell that overexpresses tRNA for these amino acids.

[0064] The proteins of the disclosure can otherwise be expressed using vectors (described more fully elsewhere herein) providing for high level transcription, fusion proteins allowing affinity purification through an epitope tag, and the like. The hosts can be either bacterial or eukaryotic or plant cells. Eukaryotic cells such as yeast, especially Saccharomyces cerevisisae, or insect cells might be particularly useful eukaryotic hosts. Expression of an engineered minor ampullate silk protein is described in U.S. Pat. No. 5,756,677, incorporated by reference herein. Such an approach can be used to express proteins of the disclosure.

[0065] In one aspect, a spidroin polypeptide or any combination thereof may be expressed in a plant cell. For example, crop plants can be engineered to express spider silk genes. In one embodiment, standard molecular biology techniques are used to generate transgenes that are transformed into a suitable plant host cell. The transgene constructs can comprise (from 5′ to 3′) the cauliflower mosaic virus promoter, signal peptide, silk protein-coding region, together with a 6Xhis tag (for detection with His antibody and protein purification) and KDEL signal (to assure retention in the ER) at the carboxy-termini. The chimeric silk protein construct will be inserted into the vector pMDC32. This vector will be used in Agrobacterium-mediated transformation of crop plants such as tobacco and tomato.

[0066] Alternatively, plastid transformation is an effective mechanism to over-produce recombinant proteins in plants. One advantage of plastid transformation is the fact that plastids are not found in most pollen grains and therefore there is a limited capacity for transgene flow to related weeds or crops. More importantly, a wide array of proteins from animals, plants and microbes have been expressed to high levels in plant chloroplasts with protein levels ranging from 0.6% to 31%. This high level of protein accumulation is attributed to the approximate 10,000 plastid genomes present per plant mesophyll cell. In addition, there are examples where protein accumulation is toxic in the cytosol or vesicles, but was non-toxic when the protein accumulated in the chloroplast. To date, tobacco plastid transformation is almost routine and tomato plastid transformation is now feasible. In one embodiment polynucleotides of the disclosure are introduced into plastids using the pRB94 vector. The coding region will be expressed from the strong Prrn protomer. The chimeric silk transgenes will be introduced into plant leaf segments using particle bombardment. Solanum lycopersicum cvMoney maker and Nicotiana tabacum Xanthi can be used as parent plants. Spectinomycin-resistant tomato callus transformants can be selected for and serially propagated. For example, while one transgenic chloroplast tomato line is recovered after bombardment of 10 plates, 14 transgenic tobacco homoplasmic lines are recovered. With each transfer to new media, transgenic calli will be screened using genomic DNA digests and DNA blots to detect parental and transgenic genomes. Homoplasmic lines (lines containing only the transgenic genomes) will be further characterized. The accumulation of silk proteins in the homoplasmic lines will be determined by immunoblots blots using His-tag antiserum and/or antibodies specific to peptides or polypeptides in the recombinant protein.

[0067] The levels of silk protein achieved in tobacco or tomato chloroplasts may partially be based on the codon usage in plant chloroplasts vs. spiders. There is a good correlation of codon usage in the silk protein RNA and codons utilized in tobacco chloroplasts.

[0068] A useful spider silk protein or fragment thereof may be (1) insoluble inside a cell in which it is expressed or (2) capable of being formed into an insoluble fiber under normal conditions by which fibers are made. Typically, the protein is insoluble under conditions (1) and (2). Specifically, the protein or fragment may be insoluble in a solvent such as water, alcohol (methanol, ethanol, etc.), acetone and/or organic acids, etc. The Spidroin polypeptides or fragment thereof should be capable of being formed into a fiber having high tensile strength. A fragment or variant may have substantially the same characteristics as a natural spider silk. The natural protein may be particularly insoluble when in fiber form and resistant to degradation by most enzymes.

[0069] Recombinant spider silk proteins may be recovered from cultures by lysing cells to release spider silk proteins expressed therein. Initially, cell debris can be separated by centrifugation. Clarified cell lysate comprised of debris and supernatant can then be repeatedly extracted with solvents in which spidroin polypeptides are insoluble, but cellular debris is soluble. These procedures can be repeated and combined with other procedures including filtration, dialysis and/or chromatography to obtain a pure product.

[0070] Fibrillar aggregates will form from solutions by spontaneous self-assembly of spider silk proteins when the protein concentration exceeds a critical value. The aggregates can be gathered and mechanically spun into macroscopic fibers. For example, the spider silk polypeptides can be viewed as derivatized polyamides. Accordingly, methods for producing fiber from soluble spider silk proteins are similar to those used to produce typical polyamide fibers, e.g. nylons, and the like. In one aspect, a spidroin polypeptide or combinations of spidroin polypeptides can be solubilized in a strongly polar solvent. The protein concentration of such a protein solution should typically be greater than 5% and is typically between 8 and 20%.

[0071] Fibers are spun from solutions having properties characteristic of a liquid crystal phase. The fiber concentration at which phase transition can occur is dependent on the polypeptide composition of a protein or combination of proteins present in the solution. Phase transition, however, can be detected by monitoring the clarity and birefringence of the solution. Onset of a liquid crystal phase can be detected when the solution acquires a translucent appearance and registers birefringence when viewed through crossed polarizing filters.

[0072] The solvent used to dissolve spidroin polypeptide should be polar. Such solvents are exemplified by di- and tri-haloacetic acids, and haloalcohols (e.g. hexafluoroisopropanol). In some instances, co-solvents such as acetone are useful. Solutions of chaotropic agents, such as lithium thiocyanate, guanidine thiocyanate or urea can also be used.

[0073] In one fiber-forming technique, fibers can first be extruded from the protein solution through an orifice into methanol, until a length sufficient to be picked up by a mechanical means is produced. Then a fiber can be pulled by such mechanical means through a methanol solution, collected, and dried.

[0074] As mentioned above, the spidroin polypeptides of the disclosure have primary structures that comprise repeating units. Synthetic spider silks can be generated wherein the primary structure of a synthetic spider silk protein can be described as a number of exact repetitions of a single unit repeat. Such a structure would be similar to a typical block copolymer. The disclosure also encompasses generation of synthetic spider silk proteins comprising unit repeats derived from several different spider silk sequences (naturally occurring variants or genetically engineered variants thereof).

[0075] Experiments on recombinant silks made with and without the C-terminal region showed that the C-terminus was useful for fibroins to form aggregates. Protein aggregation is an essential step in the precipitation of liquid spinning dope into a solid silk fiber. The C-terminus is useful for aggregation of recombinant fibroins, and for the formation of the characteristic crystalline structures that impart strength to silk fibers. As has been proposed for the C-terminus, the evolutionary conservation of the N-terminus suggests that this region is also functionally significant. For example, N-termini may play a central role in the proper transport of fibroins from secretory cells to silk gland lumen, aid in fiber formation, and contribute to the structural properties of silk fibers. Another evolutionarily conserved aspect of spider fibroins is their extremely large size, which is also a feature of independently evolved insect fibroins. Thus, large size has been repeatedly selected for in the evolution of fibroin genes. Therefore, a complete silk gene, with full representation of the N- and C-terminal regions, the intervening repetitive sequence, and the transitions among these domains, should dramatically improve recombinant silk performance.

[0076] In another aspect of the disclosure, a polypeptide may comprise various combinations of fibroin polypeptide domains. Also included are recombinant polypeptides and the polynucleotides encoding the polypeptides wherein the recombinant polypeptides are “chimeric polypeptides” or “fusion polypeptides” and comprise a sequence as set forth, for example, in SEQ ID Nos: 3, 5, 7, 9, 11, 13, 15, 17, 19, 21, 23, 25, 27, 29, 31, 33, 35, 37, 39, 41, 43, 45, 47, 49, 51, 53, 55, 57, 59, 61, 63, 65, 67, 69, 71, 73, 75, 77, 79, 81, 83, 85, 87, 89, 91, 93, 95, 97, 99, 101, 103, 105 or 107, operatively linked to a second polypeptide. The second polypeptide can be any polypeptide of interest having an activity or function independent of, or related to, the function of the spidroin polypeptide. For example, the second polypeptide can be a domain of a related but distinct member of the fibroin family of polypeptides. The term “operatively linked” is intended to indicate that the spidroin sequence and the second polypeptide sequence are fused in-frame to each other. The second polypeptide can be fused to the N-terminus or C-terminus of spidroin sequence. Such fusion polypeptides can facilitate the purification of recombinant Spidroin polypeptides. In another embodiment, the fusion polypeptide comprises a Spidroin sequence comprising a heterologous signal sequence at its N-terminus.

[0077] The spidroin polypeptides of the disclosure can also include a localization sequence to direct the polypeptide to particular cellular sites by fusion to appropriate organellar targeting signals or localized host proteins. A polynucleotide encoding a localization sequence, or signal sequence, can be ligated or fused at the 5′ terminus of a polynucleotide encoding a spidroin polypeptide such that the signal peptide is located at the amino terminal end of the resulting fusion polynucleotide/polypeptide. In eukaryotes, the signal peptide functions to transport a polypeptide across the endoplasmic reticulum. The secretory protein is then transported through the Golgi apparatus, into secretory vesicles and into the extracellular space or the external environment. Signal peptides include pre-pro peptides that contain a proteolytic enzyme recognition site.

[0078] The localization sequence can be a nuclear-, an endoplasmic reticulum-, a peroxisome-, or a mitochondrial-localization sequence, or a localized protein. Localization sequences can be targeting sequences that are described, for example, in “Protein Targeting”, chapter 35 of Stryer, L., Biochemistry (4th ed.). W.H. Freeman, 1995. Some important localization sequences include those targeting the nucleus, mitochondria, endoplasmic reticulum, peroxisome (SKF), plasma membrane, CC, CXC and the like, cytoplasmic side of plasma membrane (fusion to SNAP-25), or the Golgi apparatus (fusion to furin).

[0079] A chimeric or fusion polypeptide of the disclosure can be produced by standard recombinant molecular biology techniques. In one embodiment, polynucleotide fragments coding for the different polypeptide sequences are ligated together in-frame in accordance with conventional techniques, for example, by employing blunt-ended or stagger-ended termini for ligation, restriction enzyme digestion to provide for appropriate termini, filling-in of cohesive ends as appropriate, alkaline phosphatase treatment to avoid undesirable joining, and enzymatic ligation. Examples of polynucleotides encoding all or portions of the Spidroin polypeptides are set for in SEQ ID NOs:2, 4, 6, 8, 10, 12, 14, 16, 18, 20, 22, 24, 26, 28, 30, 32, 34, 36, 38, 40, 42, 44, 46, 48, 50, 52, 54, 56, 58, 60, 62, 64, 66, 68, 70, 72, 74, 76, 78, 80, 82, 84, 86, 88, 90, 92, 94, 96, 98, 100, 102, 104, or 106. In another embodiment, the fusion gene can be synthesized by conventional techniques including automated DNA synthesizers. Alternatively, PCR amplification of gene fragments can be carried out using anchor primers that give rise to complementary overhangs between two consecutive gene fragments that can subsequently be annealed and reamplified to generate a chimeric gene sequence (see, for example, Current Protocols in Molecular Biology, eds. Ausubel et al. John Wiley & Sons: 1992). Moreover, many expression vectors are commercially available that already encode a fusion moiety (e.g., a GST polypeptide).

[0080] The disclosure further includes polypeptides with or without associated native-pattern glycosylation. Polypeptides expressed in yeast or mammalian expression systems (e.g., COS-1 or CHO cells) can be similar to or significantly different from a native polypeptide in molecular weight and glycosylation pattern, depending upon the choice of expression system. Expression of polypeptides of the disclosure in bacterial expression systems, such as E. coli, provides non-glycosylated molecules. Further, a given preparation can include multiple differentially glycosylated species of the polypeptide. Glycosyl groups can be removed through conventional methods, in particular those utilizing glycopeptidase.

[0081] Additional variants within the scope of the disclosure include polypeptides that can be modified to create derivatives thereof by forming covalent or aggregative conjugates with other chemical moieties, such as glycosyl groups, lipids, phosphate, acetyl groups and the like. Covalent derivatives can be prepared by linking the chemical moieties to functional groups on amino acid side chains or at the N-terminus or C-terminus of a polypeptide. Conjugates comprising diagnostic (detectable) or therapeutic agents attached thereto are contemplated herein. Preferably, such alteration, substitution, replacement, insertion or deletion retains the desired activity of the polypeptide.

[0082] The disclosure also provides polynucleotides encoding spidroin polypeptides. The term “polynucleotide” refers to a polymeric form of nucleotides of at least 10 bases in length. The nucleotides can be ribonucleotides, deoxyribonucleotides, or modified forms of either type of nucleotide. The term includes single and double stranded forms of DNA or RNA. DNA includes, for example, cDNA, genomic DNA, chemically synthesized DNA, DNA amplified by PCR, and combinations thereof. The polynucleotides of the disclosure include full-length genes and cDNA molecules as well as a combination of fragments thereof. The polynucleotides of the disclosure are preferentially derived from human sources, but the disclosure includes those derived from non-human species, as well.

[0083] A polynucleotide of the disclosure will generally contain phosphodiester bonds, although in some cases, nucleic acid analogs are included that may have alternate backbones, comprising, e.g., phosphoramidate, phosphorothioate, phosphorodithioate, or O-methylphosphoroamidite linkages (see Eckstein, Oligonucleotides and Analogues: A Practical Approach, Oxford University Press); and peptide nucleic acid backbones and linkages. Other analog nucleic acids include those with positive backbones; non-ionic backbones, and non-ribose backbones, including those described in U.S. Pat. Nos. 5,235,033 and 5,034,506, and Chapters 6 and 7, ASC Symposium Series 580, Carbohydrate Modifications in Antisense Research, Sanghui & Cook, eds. Nucleic acids containing one or more carbocyclic sugars are also included within one definition of nucleic acids. Modifications of the ribose-phosphate backbone may be done for a variety of reasons, e.g. to increase the stability and half-life of such molecules in physiological environments or as probes on a biochip. Mixtures of naturally occurring nucleic acids and analogs can be made; alternatively, mixtures of different nucleic acid analogs, and mixtures of naturally occurring nucleic acids and analogs may be made.

[0084] A variety of references disclose such nucleic acid analogs, including, for example, phosphoramidate (Beaucage et al., Tetrahedron 49(10):1925 (1993) and references therein; Letsinger, J. Org. Chem. 35:3800 (1970); Sprinzl et al., Eur. J. Biochem. 81:579 (1977); Letsinger et al., Nucl. Acids Res. 14:3487 (1986); Sawai et al, Chem. Lett. 805 (1984), Letsinger et al., J. Am. Chem. Soc. 110:4470 (1988); and Pauwels et al., Chemica Scripta 26:141 91986)), phosphorothioate (Mag et al., Nucleic Acids Res. 19:1437 (1991); and U.S. Pat. No. 5,644,048), phosphorodithioate (Briu et al., J. Am. Chem. Soc. 111:2321 (1989), O-methylphosphoroamidite linkages (see Eckstein, Oligonucleotides and Analogues: A Practical Approach, Oxford University Press), and peptide nucleic acid backbones and linkages (see Egholm, J. Am. Chem. Soc. 114:1895 (1992); Meier et al., Chem. Int. Ed. Engl. 31:1008 (1992); Nielsen, Nature, 365:566 (1993); Carlsson et al., Nature 380:207 (1996), all of which are incorporated by reference). Other analog nucleic acids include those with positive backbones (Denpcy et al., Proc. Natl. Acad. Sci. USA 92:6097 (1995); non-ionic backbones (U.S. Pat. Nos. 5,386,023, 5,637,684, 5,602,240, 5,216,141 and 4,469,863; Kiedrowshi et al., Angew. Chem. Intl. Ed. English 30:423 (1991); Letsinger et al., J. Am. Chem. Soc. 110:4470 (1988); Letsinger et al., Nucleoside & Nucleotide 13:1597 (1994); Chapters 2 and 3, ASC Symposium Series 580, “Carbohydrate Modifications in Antisense Research”, Ed. Y. S. Sanghui and P. Dan Cook; Mesmaeker et al., Bioorganic & Medicinal Chem. Lett. 4:395 (1994); Jeffs et al., J. Biomolecular NMR 34:17 (1994); Tetrahedron Lett. 37:743 (1996)) and non-ribose backbones, including those described in U.S. Pat. Nos. 5,235,033 and 5,034,506, and Chapters 6 and 7, ASC Symposium Series 580, “Carbohydrate Modifications in Antisense Research”, Ed. Y. S. Sanghui and P. Dan Cook. Nucleic acids containing one or more carbocyclic sugars are also included within one definition of nucleic acids (see Jenkins et al., Chem. Soc. Rev. (1995) pp 169-176). Several nucleic acid analogs are described in Rawls, C & E News Jun. 2, 1997 page 35. All of these references are hereby expressly incorporated by reference.

[0085] Other analogs include peptide nucleic acids (PNA) which are peptide nucleic acid analogs. These backbones are substantially non-ionic under neutral conditions, in contrast to the highly charged phosphodiester backbone of naturally occurring nucleic acids. This results in two advantages. First, the PNA backbone exhibits improved hybridization kinetics. PNAs have larger changes in the melting temperature (Tₘ) for mismatched versus perfectly matched basepairs. DNA and RNA typically exhibit a 2-4° C. drop in Tₘ for an internal mismatch. With the non-ionic PNA backbone, the drop is closer to 7-9° C. Similarly, due to their non-ionic nature, hybridization of the bases attached to these backbones is relatively insensitive to salt concentration. In addition, PNAs are not degraded by cellular enzymes, and thus can be more stable.

[0086] As described above, the nucleic acid may be DNA, both genomic and cDNA, RNA or a hybrid, where the nucleic acid may contain combinations of deoxyribo- and ribo-nucleotides, and combinations of bases, including uracil, adenine, thymine, cytosine, guanine, inosine, xanthine hypoxanthine, isocytosine, isoguanine, etc. “Transcript” typically refers to a naturally occurring RNA, e.g., a pre-mRNA, hnRNA, or mRNA. As used herein, the term “nucleoside” includes nucleotides and nucleoside and nucleotide analogs, and modified nucleosides such as amino modified nucleosides. In addition, “nucleoside” includes non-naturally occurring analog structures. Thus, e.g. the individual units of a peptide nucleic acid, each containing a base, are referred to herein as a nucleoside.

[0087] By “isolated polynucleotide” is meant a polynucleotide that is not immediately contiguous with both of the coding sequences with which it is immediately contiguous (one on the 5′ end and one on the 3′ end) in the naturally occurring genome of the organism from which it is derived. The term therefore includes, for example, a recombinant polynucleotide molecule, which is incorporated into a vector, e.g., an expression vector; into an autonomously replicating plasmid or virus; or into the genomic DNA of a prokaryote or eukaryote, or which exists as a separate molecule (e.g., a cDNA) independent of other sequences.

[0088] A spidroin polynucleotide of the disclosure (1) encodes a polypeptide comprising a sequence as set forth in SEQ ID Nos: 3, 5, 7, 9, 11, 13, 15, 17, 19, 21, 23, 25, 27, 29, 31, 33, 35, 37, 39, 41, 43, 45, 47, 49, 51, 53, 55, 57, 59, 61, 63, 65, 67, 69, 71, 73, 75, 77, 79, 81, 83, 85, 87, 89, 91, 93, 95, 97, 99, 101, 103, 105 or 107; (2) has a sequence as set forth in SEQ ID Nos: 2, 4, 6, 8, 10, 12, 14, 16, 18, 20, 22, 24, 26, 28, 30, 32, 34, 36, 38, 40, 42, 44, 46, 48, 50, 52, 54, 56, 58, 60, 62, 64, 66, 68, 70, 72, 74, 76, 78, 80, 82, 84, 86, 88, 90, 92, 94, 96, 98, 100, 102, 104, or 106; (3) has sequences complementary to a sequence as set forth in SEQ ID Nos: 2, 4, 6, 8, 10, 12, 14, 16, 18, 20, 22, 24, 26, 28, 30, 32, 34, 36, 38, 40, 42, 44, 46, 48, 50, 52, 54, 56, 58, 60, 62, 64, 66, 68, 70, 72, 74, 76, 78, 80, 82, 84, 86, 88, 90, 92, 94, 96, 98, 100, 102, 104, or 106; (4) fragments of SEQ ID Nos: 2, 4, 6, 8, 10, 12, 14, 16, 18, 20, 22, 24, 26, 28, 30, 32, 34, 36, 38, 40, 42, 44, 46, 48, 50, 52, 54, 56, 58, 60, 62, 64, 66, 68, 70, 72, 74, 76, 78, 80, 82, 84, 86, 88, 90, 92, 94, 96, 98, 100, 102, 104, or 106 or their complements that specifically hybridize to the polynucleotide of (2) or (3) under moderate to highly stringent conditions; and (5) polynucleotides of (1), (2), (3), or (4) wherein T can also be U (e.g., RNA sequences).

[0089] Among the uses of the disclosed spidroin polynucleotides, and combinations of fragments thereof, is the use of fragments as probes or primers. Such fragments generally comprise at least about 17 contiguous nucleotides of a DNA sequence. In other embodiments, a DNA fragment comprises at least 30, or at least 60 contiguous nucleotides of a DNA sequence. The basic parameters affecting the choice of hybridization conditions and guidance for devising suitable conditions are set forth by Sambrook et al., 1989 and are described in detail above. Using knowledge of the genetic code in combination with the amino acid sequences set forth above, sets of degenerate oligonucleotides can be prepared. Such oligonucleotides are useful as primers, e.g., in polymerase chain reactions (PCR), whereby DNA fragments are isolated and amplified. In certain embodiments, degenerate primers can be used as probes for non-human genetic libraries. Such libraries would include but are not limited to cDNA libraries, genomic libraries, and even electronic EST (express sequence tag) or DNA libraries.

[0090] The disclosure also includes polynucleotides and oligonucleotides that hybridize under reduced stringency conditions, typically moderately stringent conditions, and commonly highly stringent conditions, to spidroin polynucleotides described herein. The basic parameters affecting the choice of hybridization conditions and guidance for devising suitable conditions are set forth by Sambrook, J., E. F. Fritsch, and T. Maniatis (1989, Molecular Cloning: A Laboratory Manual, Cold Spring Harbor Laboratory Press, Cold Spring Harbor, N.Y., chapters 9 and 11; and Current Protocols in Molecular Biology, 1995, F. M. Ausubel et al., eds., John Wiley & Sons, Inc., sections 2.10 and 6.3-6.4, incorporated herein by reference), and can be readily determined by those having ordinary skill in the art based on, for example, the length and/or base composition of the polynucleotide. One way of achieving moderately stringent conditions involves the use of a prewashing solution containing 5×SSC, 0.5% SDS, 1.0 mM EDTA (pH 8.0), hybridization buffer of about 50% formamide, 6×SSC, and a hybridization temperature of about 55° C. (or other similar hybridization solutions, such as one containing about 50% formamide, with a hybridization temperature of about 42° C.), and washing conditions of about 60° C., in 0.5×SSC, 0.1% SDS. Generally, highly stringent conditions are defined as hybridization conditions as above, but with washing at approximately 68° C., 0.2×SSC, 0.1% SDS, SSPE (1×SSPE is 0.15M NaCl, 10 mM NaH₂PO₄, and 1.25 mM EDTA, pH 7.4) can be substituted for SSC (1×SSC is 0.15M NaCl and 15 mM sodium citrate) in the hybridization and wash buffers; washes are performed for 15 minutes after hybridization is complete. It should be understood that the wash temperature and wash salt concentration can be adjusted as necessary to achieve a desired degree of stringency by applying the basic principles that govern hybridization reactions and duplex stability, as known to those skilled in the art and described further below (see, e.g., Sambrook et al., 1989). When hybridizing a nucleic acid to a target polynucleotide of unknown sequence, the hybrid length is assumed to be that of the hybridizing nucleic acid. When nucleic acids of known sequence are hybridized, the hybrid length can be determined by aligning the sequences of the nucleic acids and identifying the region or regions of optimal sequence complementarity. The hybridization temperature for hybrids anticipated to be less than 50 base pairs in length should be 5 to 10° C. less than the melting temperature (Tₘ) of the hybrid, where Tₘ is determined according to the following equations. For hybrids less than 18 base pairs in length, Tₘ (° C.)=2(# of A+T bases)+4(# of G+C bases). For hybrids above 18 base pairs in length, Tₘ (° C.)=81.5+16.6(log₁₀ [Na⁺])+0.41(% G+C)−(600/N), where N is the number of bases in the hybrid, and [Na⁺] is the concentration of sodium ions in the hybridization buffer ([Na⁺] for 1×SSC=0.165M). Preferably, each such hybridizing nucleic acid has a length that is at least 25% (more preferably at least 50%, 60%, or 70%, and most preferably at least 80%) of the length of a polynucleotide of the disclosure to which it hybridizes, and has at least 60% sequence identity (more preferably at least 70%, 75%, 80%, 85%, 90%, 95%, 97.5%, or at least 99%, and most preferably at least 99.50) with a polynucleotide of the disclosure to which it hybridizes.

[0091] “Conservatively modified variants” applies to both polypeptide and polynucleotide. With respect to particular polynucleotide, conservatively modified variants refer to codons in the polynucleotide which encode identical or essentially identical amino acids. Because of the degeneracy of the genetic code, a large number of functionally identical polynucleotides encode any given protein. For instance, the codons GCA, GCC, GCG and GCU all encode the amino acid alanine. Thus, at every position where an alanine is specified by a codon, the codon can be altered to any of the corresponding codons described without altering the encoded polypeptide. Such variations are “silent variations,” which are one species of conservatively modified variations. Every polynucleotide sequence herein that encodes a polypeptide also describes every possible silent variation of the nucleic acid. One of skill will recognize that each codon in a polynucleotide (except AUG, which is ordinarily the only codon for methionine) can be modified to yield a functionally identical molecule. Accordingly, each silent variation of a nucleic acid that encodes a polypeptide is implicit in each described sequence.

[0092] The disclosure also provides methodology for analysis of polynucleotides of the disclosure on “DNA chips” as described in Hacia et al., Nature Genetics, 14:441-447 (1996). For example, high-density arrays of oligonucleotides consisting of a sequence as set forth in SEQ ID Nos: 2, 4, 6, 8, 10, 12, 14, 16, 18, 20, 22, 24, 26, 28, 30, 32, 34, 36, 38, 40, 42, 44, 46, 48, 50, 52, 54, 56, 58, 60, 62, 64, 66, 68, 70, 72, 74, 76, 78, 80, 82, 84, 86, 88, 90, 92, 94, 96, 98, 100, 102, 104, or 106, or a variant or mutant thereof are applied and immobilized to the chip and can be used to detect sequence variations in a population. Polynucleotides in a test sample are hybridized to the immobilized oligonucleotides. The hybridization profile of the target polynucleotide to the immobilized probe is quantitated and compared to a reference profile. The resulting genetic information can be used in molecular identification. The density of oligonucleotides on DNA chips can be modified as needed.

[0093] The disclosure also provides genes corresponding to the polynucleotides disclosed herein. “Corresponding genes” are the regions of the genome that are transcribed to produce the mRNAs from which cDNA molecules are derived and may include contiguous regions of the genome necessary for the regulated expression of such genes. Corresponding genes may therefore include but are not limited to coding sequences, 5′ and 3′ untranslated regions, alternatively spliced exons, introns, promoters, enhancers, and silencer or suppressor elements. The corresponding genes can be isolated in accordance with known methods using the sequence information disclosed herein. Such methods include the preparation of probes or primers from the disclosed sequence information for identification and/or amplification of genes in appropriate genomic libraries or other sources of genomic materials.

[0094] Expression, isolation, and purification of the polypeptides and fragments of the disclosure can be accomplished by any suitable technique, including but not limited to the following methods and those described elsewhere herein.

[0095] The isolated polynucleotides of the disclosure may be operably linked to an expression control sequence such as the pMT2 or pED expression vectors disclosed in Kaufman et al., Nucleic Acids Res. 19:4485 (1991); and Pouwels et al. Cloning Vectors: A Laboratory Manual, Elsevier, New York, (1985, and Supplements), in order to produce a polypeptide of the disclosure recombinantly. Many suitable expression control sequences are known in the art. General methods of expressing recombinant polypeptides are also known and are exemplified in R. Kaufman, Methods in Enzymology 185:537 (1990). As defined herein “operably linked” means that an isolated polynucleotide of the disclosure and an expression control sequence are situated within a vector or cell in such a way that the polypeptide encoded by the polynucleotide is expressed by a host cell which has been transformed (transfected) with the vector or polynucleotide operably linked to the control sequence.

[0096] For example, expression of the spirdoin protein can be performed in E. coli by inserting the polynucleotide encoding a spirdoin polypeptide of the disclosure into plasmid vectors pFP202 and pFP204, which can be derived from the well-known vector pET11a. In these vectors, the dragline protein-coding gene is inserted in such a manner as to be operably linked to a promoter derived from bacteriophage T7. This promoter is joined with sequences derived from the lac operator of E. coli, which confers regulation by lactose or analogs (IPTG). The E. coli host strain BL21(DE3) contains a lambda prophage which carries a gene encoding bacteriophage T7 RNA polymerase. This gene is controlled by a promoter which is also regulated by lactose or analogs. In addition to the phage T7 promoter, the vectors pFP202 and pFP204 provide sequences which encode a C-terminal tail containing six consecutive histidine residues appended to the dragline protein-coding sequences. This tail provides a means of affinity purification of the protein under denaturing conditions through its adsorption to resins bearing immobilized Ni ions.

[0097] In addition, a sequence encoding an appropriate signal peptide (native or heterologous) can be incorporated into expression vectors. The choice of signal peptide or leader can depend on factors such as the type of host cells in which the recombinant polypeptide is to be produced. Examples of heterologous signal peptides that are functional in mammalian host cells include the signal sequence for interleukin (IL)-7 (see, U.S. Pat. No. 4,965,195); the signal sequence for IL-2 receptor (see, Cosman et al., Nature 312:768, 1984); the IL4 receptor signal peptide (see, EP 367,566); the type I IL-1 receptor signal peptide (see, U.S. Pat. No. 4,968,607); and the type II IL-1 receptor signal peptide (see, EP 460,846). A signal peptide that is functional in the intended host cells promotes extracellular secretion of the polypeptide. The signal peptide is cleaved from the polypeptide upon secretion of a polypeptide from the cell. A polypeptide preparation can include a mixture of polypeptide molecules having different N-terminal amino acids, resulting from cleavage of the signal peptide at more than one site.

[0098] Established methods for introducing DNA into mammalian cells have been described (Kaufman, R. J., Large Scale Mammalian Cell Culture, 1990, pp. 15-69). Additional protocols using commercially available reagents, such as Lipofectamine or Lipofectamine-Plus lipid reagent (Gibco/BRL), can be used to transfect cells (Felgner et al., Proc. Natl. Acad. Sci. USA 84:7413, 1987). In addition, electroporation can be used to transfect mammalian cells using conventional procedures, such as those in Sambrook et al. (Molecular Cloning: A Laboratory Manual, 2 ed. Vol. 1-3, Cold Spring Harbor Laboratory Press, 1989). Selection of stable transformants can be performed using methods known in the art, such as, for example, resistance to cytotoxic drugs. Kaufman et al., Meth. in Enzymology 185:487, 1990, describes several selection schemes, such as dihydrofolate reductase (DHFR) resistance. A suitable strain for DHFR selection can be CHO strain DX-B11, which is deficient in DHFR (Urlaub et al., Proc. Natl. Acad. Sci. USA 77:4216, 1980). A plasmid expressing the DHFR cDNA can be introduced into strain DX-B11, and only cells that contain the plasmid can grow in the appropriate selective media. Other examples of selectable markers that can be incorporated into an expression vector include cDNAs conferring resistance to antibiotics, such as G418 and hygromycin B. Cells harboring the vector are selected on the basis of resistance to these compounds.

[0099] Alternatively, gene products can be obtained via homologous recombination, or “gene targeting” techniques. Such techniques employ the introduction of exogenous transcription control elements (such as the CMV promoter or the like) in a particular predetermined site on the genome, to induce expression of an endogenous Spidroin of the disclosure. The location of integration into a host chromosome or genome can be easily determined by one of skill in the art, given the known location and sequence of the gene. In a preferred embodiment, the disclosure also contemplates the introduction of exogenous transcriptional control elements in conjunction with an amplifiable gene, to produce increased amounts of the gene product. The practice of homologous recombination or gene targeting is explained by Chappel in U.S. Pat. No. 5,272,071 (see also Schimke, et al. “Amplification of Genes in Somatic Mammalian cells,” Methods in Enzymology 151:85 (1987), and by Capecchi, et al., “The New Mouse Genetics: Altering the Genome by Gene Targeting,” TIG 5:70 (1989)).

[0100] Suitable host cells for expression of the polypeptide include eukaryotic, insect, plant and prokaryotic cells. Mammalian host cells include, for example, the COS-7 line of monkey kidney cells (ATCC CRL 1651) (Gluzman et al., Cell 23:175, 1981), L cells, C127 cells, 3T3 cells (ATCC CCL 163), Chinese hamster ovary (CHO) cells, HeLa cells, BHK (ATCC CRL 10) cell lines, the CV1/EBNA cell line derived from the African green monkey kidney cell line CV1 (ATCC CCL 70) (see, McMahan et al. EMBO J. 10: 2821, 1991), human kidney 293 cells, human epidermal A431 cells, human Colo205 cells, other transformed primate cell lines, normal diploid cells, cell strains derived from in vitro culture of primary tissue, primary explants, HL-60, U937, HaK or Jurkat cells. Alternatively, it may be possible to produce the polypeptide in lower eukaryotes such as yeast or in prokaryotes such as bacteria. Potentially suitable yeast strains include Saccharomyces cerevisiae, Schizosaccharomyces pombe, Kluyveromyces strains, Candida, or any yeast strain capable of expressing heterologous polypeptides. Potentially suitable bacterial strains include, for example, Escherichia coli, Bacillus subtilis, Salmonella typhimurium, or any bacterial strain capable of expressing heterologous polypeptides. If the polypeptide is made in yeast or bacteria, it may be necessary to modify the polypeptide produced therein, for example by phosphorylation or glycosylation of the appropriate sites, in order to obtain the functional polypeptide. Such covalent attachments may be accomplished using known chemical or enzymatic methods. The polypeptide may also be produced by operably linking a polynucleotide of the disclosure to suitable control sequences in one or more insect expression vectors, and employing an insect expression system. Materials and methods for baculovirus/insect cell expression systems are commercially available in kit form from, e.g., Invitrogen, San Diego, Calif., U.S.A. (the MaxBac® kit), as well as methods described in Summers and Smith, Texas Agricultural Experiment Station Bulletin No. 1555 (1987), and Luckow and Summers, Bio/Technology 6:47 (1988), incorporated herein by reference. Cell-free translation systems could also be employed to produce polypeptides using RNAs derived from nucleic acid constructs disclosed herein. A host cell that comprises an isolated polynucleotide of the disclosure, preferably operably linked to at least one expression control sequence, is a “recombinant host cell”.

[0101] In one embodiment, antagonists can be designed to reduce the level of endogenous Spidroin expression, e.g., using known antisense or ribozyme approaches to inhibit or prevent translation of Spidroin mRNA transcripts; triple helix approaches to inhibit transcription of Spidroin genes; or targeted homologous recombination to inactivate or “knock out” the Spidroin genes or their endogenous promoters or enhancer elements. Such antisense, ribozyme, and triple helix antagonists may be designed to reduce or inhibit either unimpaired or, if appropriate, mutant Spidroin activity. Such antagonists can be used as anti-insecticidals.

[0102] Antisense RNA and DNA molecules act to directly block the translation of mRNA by hybridizing to targeted mRNA and preventing polypeptide translation. Antisense approaches involve the design of oligonucleotides (either DNA or RNA) that are complementary to a mRNA having a Spidroin polynucleotide sequence. Absolute complementarity, although preferred, is not required. Oligonucleotides that are complementary to the 5′ end of the message, e.g., the 5′ untranslated sequence up to, and including, the AUG initiation codon, should work most efficiently at inhibiting translation. Antisense nucleic acids are preferably oligonucleotides ranging from 6 to about 50 nucleotides in length. The oligonucleotides can be DNA, RNA, chimeric mixtures, derivatives or modified versions thereof, single-stranded or double-stranded. The oligonucleotide can be modified at the base moiety, sugar moiety, or phosphate backbone, for example, to improve stability of the molecule, hybridization, and the like. The oligonucleotide may include other appended groups such as peptides (e.g., for targeting host cell receptors in vivo), or agents facilitating transport across the cell membrane (see, e.g., Letsinger et al., Proc. Natl. Acad. Sci. U.S.A. 86:6553, 1989; Lemaitre et al., Proc. Natl. Acad. Sci. 84:648, 1987; PCT Publication No. WO88/09810), or hybridization-triggered cleavage agents or intercalating agents (see, e.g., Zon, Pharm. Res. 5:539, 1988). The antisense molecules are delivered to cells, which express a transcript having a Spidroin polynucleotide sequence in vivo by, for example, direct injection into the tissue or cell derivation site, or modified antisense molecules, designed to target the desired cells (e.g., antisense linked to peptides or antibodies that specifically bind receptors or antigens expressed on the target cell surface) can be administered systemically. Preferred approach utilizes a recombinant DNA construct in which the antisense oligonucleotide is placed under the control of a strong pol III or pol II promoter.

[0103] Ribozyme molecules designed to catalytically cleave mRNA transcripts having a spidroin polynucleotide sequence prevent translation of Spidroin mRNA (see, e.g., PCT International Publication WO90/11364; U.S. Pat. No. 5,824,519). Ribozymes are RNA molecules possessing the ability to specifically cleave other single-stranded RNA. Because ribozymes are sequence-specific, only mRNAs with particular sequences are inactivated. There are two basic types of ribozymes namely, tetrahymena-type (Hasselhoff, Nature, 334:585, 1988) and “hammerhead”-type. Tetrahymena-type ribozymes recognize sequences, which are four bases in length, while “hammerhead”-type ribozymes recognize base sequences 11-18 bases in length. The longer the recognition sequence, the greater the likelihood that the sequence will occur exclusively in the target mRNA species. Consequently, hammerhead-type ribozymes are preferable to tetrahymena-type ribozymes. As in the antisense approach, ribozymes can be composed of modified oligonucleotides and delivered using a DNA construct “encoding” the ribozyme under the control of a strong constitutive pol III or pol II promoter.

[0104] Alternatively, endogenous Spidroin expression can be reduced by targeting DNA sequences complementary to a regulatory region of the target gene (e.g., the target gene promoter and/or enhancers) to form triple helical structures that prevent transcription of the target gene (see generally, Helene, Anticancer Drug Des., 6(6), 569, 1991; Helene, et al., Ann. N.Y. Acad. Sci., 660:27, 1992; and Maher, Bioassays 14(12), 807, 1992).

[0105] Antisense, ribozyme, and triple helix molecules of the disclosure may be prepared by any method known in the art for the synthesis of DNA and RNA molecules and include techniques for chemically synthesizing oligodeoxyribonucleotides and oligoribonucleotides such as, for example, solid phase phosphoramidite chemical synthesis using an automated DNA synthesizer available from Biosearch, Applied Biosystems. Phosphorothioate oligonucleotides may be synthesized by the method of Stein et al., Nucl. Acids Res. 16:3209, 1988. Methylphosphonate oligonucleotides can be prepared by use of controlled pore glass polymer supports (Sarin et al., Proc. Natl. Acad. Sci. U.S.A. 85:7448, 1988). Alternatively, RNA molecules may be generated by in vitro and in vivo transcription of DNA sequences encoding the antisense RNA molecule.

[0106] As used herein, a “transgenic organism” is a non-human organism that includes a transgene that is inserted into an embryonal cell and becomes a part of the genome of the organism that develops from that cell, or an offspring of such an organism. Any non-human organism that can be produced by transgenic technology is included in the disclosure. Typical organisms can include non-human animals, silk worms and other insects, and plant cells into which a Spidroin transgene has been inserted.

[0107] A “transgene” is a polynucleotide that comprises one or more selected sequences (e.g., encoding a Spidroin, encoding ribozymes that cleave Spidroin mRNA, encoding an antisense molecule to a Spidroin mRNA, encoding a mutant Spidroin sequence, and the like) to be expressed in a transgenic organism. The polynucleotide is partly or entirely heterologous, i.e., foreign, to the transgenic animal, plant or insect, or homologous to an endogenous gene of the transgenic animal, plant or insect, but which is designed to be inserted into the genome at a location which differs from that of the natural gene. A transgene may include one or more promoters and any other DNA sequences, such as introns, necessary for expression of the selected DNA, all operably linked to the selected DNA, and may include an enhancer sequence.

[0108] The transgenic organism can be used for the production of spider silk dragline commprising a Spidroin polypeptide or fragment thereof. For example, a transgenic organism can be used for large scale production of silk materials using the polynucleotides of the disclosure. Such silk materials can be harvested and used for the generation of textiles, biomaterials and the like. In another aspect, the transgenic organism can be used in order to identify the impact of increased or decreased Spidroin levels on a particular pathway or phenotype. Protocols useful in producing such transgenic animals are known in the art (see, e.g., Brinster, et al., Proc. Natl. Acad. Sci. USA 82:4438, 1985; Jaenisch, Proc. Natl. Acad. Sci. USA 73:1260, 1976; Hogan, et al., 1986, Manipulating the Mouse Embryo, Cold Spring Harbor Laboratory Press, Cold Spring Harbor, N.Y.; Jahner, et al., Proc. Natl. Acad. Sci. USA 82:6927, 1985; Van der Putten, et al., Proc Natl. Acad. Sci. USA 82:6148; Steward, et al., EMBO J., 6:383, 1987; Jahner, et al., Nature, 298:623, 1982).

[0109] In another embodiment, antibodies that are immunoreactive with the polypeptides of the disclosure are provided herein. The Spidroin polypeptides, fragments, variants, fusion polypeptides, and the like, as set forth above, can be employed as “immunogens” in producing antibodies immunoreactive therewith. Such antibodies specifically bind to the polypeptides via the antigen-binding sites of the antibody. Specifically binding antibodies are those that will specifically recognize and bind with Spidroin family polypeptides, homologues, and variants, but not with other molecules. In one embodiment, the antibodies are specific for polypeptides having a spidroin amino acid sequence of the disclosure and do not cross-react with other polypeptides.

[0110] More specifically, the polypeptides, fragment, variants, fusion polypeptides, and the like contain antigenic determinants or epitopes that elicit the formation of antibodies. These antigenic determinants or epitopes can be either linear or conformational (discontinuous). Linear epitopes are composed of a single section of amino acids of the polypeptide, while conformational or discontinuous epitopes are composed of amino acids sections from different regions of the polypeptide chain that are brought into close proximity upon polypeptide folding. Epitopes can be identified by any of the methods known in the art. Additionally, epitopes from the polypeptides of the disclosure can be used as research reagents, in assays, and to purify specific binding antibodies from substances such as polyclonal sera or supernatants from cultured hybridomas. Such epitopes or variants thereof can be produced using techniques known in the art such as solid-phase synthesis, chemical or enzymatic cleavage of a polypeptide, or using recombinant DNA technology.

[0111] Both polyclonal and monoclonal antibodies to the polypeptides of the disclosure can be prepared by conventional techniques. See, for example, Monoclonal Antibodies, Hybridomas: A New Dimension in Biological Analyses, Kennet et al. (eds.), Plenum Press, New York (1980); and Antibodies: A Laboratory Manual, Harlow and Land (eds.), Cold Spring Harbor Laboratory Press, Cold Spring Harbor, N.Y., (1988); Kohler and Milstein, (U.S. Pat. No. 4,376,110); the human B-cell hybridoma technique (Kosbor et al., Immunology Today 4:72, 1983; Cole et al., Proc. Natl. Acad. Sci. USA 80:2026, 1983); and the EBV-hybridoma technique (Cole et al., 1985, Monoclonal Antibodies And Cancer Therapy, Alan R. Liss, Inc., pp. 77-96). Hybridoma cell lines that produce monoclonal antibodies specific for the polypeptides of the disclosure are also contemplated herein. Such hybridomas can be produced and identified by conventional techniques. For the production of antibodies, various host animals may be immunized by injection with a Spidroin and Spidroin polypeptide, fragment, variant, or mutants thereof. Such host animals may include, but are not limited to, rabbits, mice, and rats, to name a few. Various adjutants may be used to increase the immunological response. Depending on the host species, such adjutants include, but are not limited to, Freund's (complete and incomplete), mineral gels such as aluminum hydroxide, surface active substances such as lysolecithin, pluronic polyols, polyanions, peptides, oil emulsions, keyhole limpet hemocyanin, dinitrophenol, and potentially useful human adjutants such as BCG (bacille Calmette-Guerin) and Corynebacterium parvum. The monoclonal antibodies can be recovered by conventional techniques. Such monoclonal antibodies may be of any immunoglobulin class including IgG, IgM, IgE, IgA, IgD, and any subclass thereof.

[0112] Antibody fragments, which recognize specific epitopes, may be generated by known techniques. For example, such fragments include but are not limited to: the F(ab′)₂ fragments which can be produced by pepsin digestion of the antibody molecule and the Fab fragments which can be generated by reducing the disulfide bridges of the (ab′)₂ fragments. Alternatively, Fab expression libraries may be constructed (Huse et al., Science, 246:1275, 1989) to allow rapid and easy identification of monoclonal Fab fragments with the desired specificity. Techniques described for the production of single chain antibodies (U.S. Pat. No. 4,946,778; Bird, Science 242:423, 1988; Huston et al., Proc. Natl. Acad. Sci. USA 85:5879, 1988; and Ward et al., Nature 334:544, 1989) can also be adapted to produce single chain antibodies against polypeptides containing Spidroin amino acid sequences.

[0113] The antibodies of the disclosure can also be used in assays to detect the presence of the polypeptides or fragments of the disclosure, either in vitro or in vivo. The antibodies also can be employed in purifying polypeptides or fragments of the disclosure by immunoaffinity chromatography.

[0114] The disclosure provides methods for identifying agents that modulate Spidroin activity or expression. Such methods included contacting a sample containing a spidroin polypeptide or polynucleotide with a test agent under conditions that allow for the test agent and the polypeptide or polynucleotide to interact and measuring the expression or activity of a Spidroin polypeptide in the presence or absence of the test agent.

[0115] In one embodiment, a cell containing a Spidroin polynucleotide is contacted with a test agent under conditions such that the cell and test agent are allowed to interact. Such conditions typically include normal cell culture conditions consistent with the particular cell type being utilized and which are known in the art. It may be desirable to allow the test agent and cell to interact under conditions associated with increased temperature or in the presence of regents that facilitate the uptake of the test agent by the cell. A control is treated similarly but in the absence of the test agent. Alternatively, the Spidroin activity or expression may be measured prior to contact with the test agent (e.g., the standard or control measurement) and then again following contact with the test agent. The treated cell is then compared to the control and a difference in the expression or activity of Spidroin compared to the control is indicative of an agent that modulates Spidroin activity or expression.

[0116] When Spidroin expression is being measured, detecting the amount of mRNA encoding a spidroin polypeptide in the cell can be quantified by, for example, RT-PCR or Northern blot. Where a change in the amount of Spidroin polypeptide in the sample is being measured, detecting Spidroin by use of anti-Spidroin antibodies can be used to quantify the amount of Spidroin polypeptide in the cell using known techniques.

[0117] A test agent can be any molecule typically used in the modulation of protein activity or expression and includes, for example, small molecules, chemicals, peptidomimetics, antibodies, peptides, polynucleotides (e.g., antisense or ribozyme molecules), and the like. Accordingly, agents developed by computer based design can be tested in the laboratory using the assay and methods described herein to determine the activity of the agent on the modulation of Spidroin activity or expression. Modulation of Spidroin includes an increase or decrease in activity or expression or strength of the resulting fibrous material.

[0118] Uses of Spidroin polypeptides and peptide fragments thereof include, but are not limited to, the following: delivery agents; textile materials; biomaterials for wound repair; biomaterials for tissue engineering; puncture resistant materials; molecular weight and isoelectric focusing markers; and preparation of antibodies.

[0119] The spider silk compositions provided herein find uses in the textile industry (e.g., as filaments, yarns, ropes, and woven material). Such materials made using the methods and compositions described herein will take advantage of the extreme toughness, tensile strength, and extensibility of silk. In addition, the polypeptides of the disclosure can be used in pliant energy absorbing devices including armor and bumpers. Besides the mechanical properties of spider silk, silk is proteinaceous (thus not petroleum-based like nylon or Kevlar). Accordingly, the polypeptides of the disclosure provide biocompatible and biodegradable material useful in various industries including textiles and medicine. For example, the supercontraction ability of dragline silk can be beneficial for sutures that can tighten, compression bandages, or space minimizing packaging. Additionally the polypeptides can be used in the generation of scaffolds and material in tissue engineering, implants and other cell scaffold-based materials. The polypeptides of the disclosure can be used in the generation of biomaterials comprising other proteinacious substances (e.g., as a collagen and silk material combination).

[0120] For compositions of the disclosure which are useful for tissue repair or regeneration, the therapeutic method includes administering or contacting a site in need of wound repair with a biomaterial comprising a Spidroin polypeptide or fragment, physiologically acceptable form of the composition can be used topically, systematically, locally or in association with an implant or device.

[0121] Further encompassed by the disclosure are systems and methods for analyzing Spidroin polypeptides comprising identifying and/or characterizing one or more Spidroin polypeptides, encoding nucleic acids, and corresponding genes, these systems and methods comprise a data set representing a set of one or more Spidroin molecules, or the use thereof. Accordingly, the disclosure provides a computer readable medium having stored thereon a member selected from the group consisting of a polynucleotide comprising a sequence as set forth in SEQ ID Nos: 2, 4, 6, 8, 10, 12, 14, 16, 18, 20, 22, 24, 26, 28, 30, 32, 34, 36, 38, 40, 42, 44, 46, 48, 50, 52, 54, 56, 58, 60, 62, 64, 66, 68, 70, 72, 74, 76, 78, 80, 82, 84, 86, 88, 90, 92, 94, 96, 98, 100, 102, 104, or 106; a polypeptide comprising a sequence as set forth in SEQ ID Nos: 3, 5, 7, 9, 11, 13, 15, 17, 19, 21, 23, 25, 27, 29, 31, 33, 35, 37, 39, 41, 43, 45, 47, 49, 51, 53, 55, 57, 59, 61, 63, 65, 67, 69, 71, 73, 75, 77, 79, 81, 83, 85, 87, 89, 91, 93, 95, 97, 99, 101, 103, 105 or 107; a set of polynucleotide sequences wherein at least one of said sequences comprises a sequence as set forth in SEQ ID Nos: 2, 4, 6, 8, 10, 12, 14, 16, 18, 20, 22, 24, 26, 28, 30, 32, 34, 36, 38, 40, 42, 44, 46, 48, 50, 52, 54, 56, 58, 60, 62, 64, 66, 68, 70, 72, 74, 76, 78, 80, 82, 84, 86, 88, 90, 92, 94, 96, 98, 100, 102, 104, or 106; and a set of polypeptide sequences wherein at least one of said sequences comprises a sequence as set forth in SEQ ID Nos: 3, 5, 7, 9, 11, 13, 15, 17, 19, 21, 23, 25, 27, 29, 31, 33, 35, 37, 39, 41, 43, 45, 47, 49, 51, 53, 55, 57, 59, 61, 63, 65, 67, 69, 71, 73, 75, 77, 79, 81, 83, 85, 87, 89, 91, 93, 95, 97, 99, 101, 103, 105 or 107.

[0122] One embodiment of the disclosure comprises a computing environment and a plurality of algorithms selectively executed to analyze a polypeptide or polynucleotide of the disclosure. Examples of analyses of a spidroin polypeptide include, without limitation, displaying the amino acid sequence of a polypeptide in the set, comparing the amino acid sequence of one polypeptide in the set to the amino acid sequence of another polypeptide in the set, predicting the structure of a polypeptide in the set, determining the nucleotide sequences of nucleic acids encoding a polypeptide in the set, and identifying a gene corresponding to a polypeptide in the set.

[0123] cDNA transcripts, partial-length genes, and full-length genes were deduced from multiple species of spiders. These nucleotide sequences encode spider silk proteins that can be used directly (expressed with no modification) or with modifications (such as manipulating codons and adding promoters and tags to facilitate high yield and purification) for the production of biomaterials with novel combinations of properties. Some of the sequences described below include previously unknown gene regions for partially described spidroins.

### EXAMPLES

### Taxonomic Sampling

[0124] Our taxonomic sampling was aimed at covering phylogenetic diversity and surveying a variety of web architectures. The mesothele representative, Liphistius malayanus, constructs a subterranean burrow with a trapdoor and radiating sensory lines. Six species of mygalomorphs were sampled. From the Atypoidea Glade, which is the sister group to remaining mygalomorphs (Hedin and Bond, 2006; Ayoub et al., 2007a), the following species were selected, with web constructs in parentheses: Megahexura fulva (sheet-web), Hexura picea (sheet-web), Sphodros rufipes (purse-web), and Antrodiaetus riversi (burrow with turret-like entrance). Two non-atypoid mygalomorphs were sampled from the family Theraphosidae, Aphonopelma seemanni, a ground dweller (burrow/sheet web), and Poecilotheria regalis, an arboreal species (sheet web). The lamp-shade web spider, Hypochilus thorelli, which is a member of the basal araneomorph lineage, Paleocribellatae was also included.

[0125] cDNA Library Construction and Screening.

[0126] The cDNA library construction methods described in Garb et al. (2007) were used. Briefly, each spider was anesthetized with CO₂ and then the entire set of silk glands was removed intact. The silk glands were frozen in liquid nitrogen and stored at −80° C. With the exception of the two theraphosids, glands from multiple individuals of the same species were combined to obtain sufficient tissue. Total RNA was extracted using TRIzol (Invitrogen, Carlsbad, Calif.) and the RNeasy Minikit (Qiagen, Valencia, Calif.). mRNA was isolated from total RNA using Dynal magnetic beads with oligo-(dT) anchors (Invitrogen). Double stranded cDNA was constructed using the Superscript Choice protocol (Invitrogen), and then size selected for large fragments using Chroma Spin 1000 columns (Clontech, Mountain View, Calif.). The size-selected cDNA was ligated into pZErO 2.0 vectors that had been digested with EcoRV, and then transformed into TOP10 Escherichia coli (Invitrogen). For each species, ˜1400-1700 cDNA clones were arrayed into 96-well microtiter plates. The libraries were stored at −80° C.

[0127] Approximately one third of each library was screened using the method of Beuken, Vink, and Bruggeman (1998) and sequenced clones containing inserts 500 base pairs with T7 and Sp6 universal primers. Sequences were compared to the NCBI nr database using BLASTX (Altschul et al., 1990) to identify potential silk homologs. Libraries were also replicated onto nylon filters and probed with γ³² P-labeled oligonucleotides. All libraries were screened with GCDGCDGCDGCDGCDGC (SEQ ID NO:109) and CCWGCWCCWGCWCCWGCWCC (SEQ DI NO:110), which were designed based on motifs common to spidroins (Gatesy et al., 2001; Garb and Hayashi, 2005; Garb et al., 2006). Additionally, libraries were screened with taxon specific probes designed from the end sequences of the size-selected clones. For putative Liphistius Egg Case Proteins (ECPs), the following probes were developed: 1) TAGTAATAAGTTCCATCGCA (SEQ ID NO:111), 2) GCAAGGATTATAAGGATG (SEQ ID NO:112), 3) CTTACCCTCTCCACATTCAGT (SEQ ID NO:113), 4) GGTTTAACTTTGTTGGCGTC (SEQ ID NO:114), 5) GGGGTCGTAAAATGATTGATA (SEQ ID NO:115), 6) ACATTGGTTCTTTTTGTAGCA (SEQ ID NO:116), and 7) GTTCTTGTCGTAGCATTTGTA (SEQ ID NO:117). Probes designed from putative spidroins were 8) AAAAGCAGTGGCAGTGGCTTC (SEQ ID NO:118), 9) CCCCTAAAATAGGTATTCTGATA (SEQ ID NO:119) (8, 9 for Liphistius); 10) GCCGTATGATGCTGACTGTAG (SEQ ID NO:120), 11) TGCTGATGCGGCGGCTTG (SEQ ID NO:121), 12) GCTTGCATAGGCTGAGGC (SEQ ID NO:122) (10-12 for Megahexura); 13) TATATCAGTTCCATATGGTCC (SEQ ID NO:123), 14) GGATCGAAAACGTTGTGAAA (SEQ ID NO:124), 15) AGCTGCTTCATTTGCTGTGTT (SEQ ID NO:125), 16) CTTACCACAGGCGTAACC (SEQ ID NO:126) (13-16 for Hexura); 17) GCCGCTGCATCGGCGTAGGC (SEQ ID NO:127), 18) AATGCAAATGCGATGGCATA (SEQ ID NO:128), 19) CAACACACCACTCAATCCAGA (SEQ ID NO:129) (17-19 for Sphodros); 20) GCTCCTTCWCTMCCATATCCTCC (SEQ ID NO:130), 21) GCTTCAGCATAYGCTTTTGC (SEQ ID NO:131), 22) TCTRGCATAACTAGCGGCATC (SEQ ID NO:132), 23) GTAAACTGATTCGAATTCGTC (SEQ ID NO:133) (20-23 for Antrodiaetus); 24) TTATCACACATCATTTTTCC (SEQ ID NO:134) (24 for Aphonopelma); 25) CATGGCAGAGGGTATCAGGT (SEQ ID NO:135), 26) AGTGTAATTTGCAATGCC (SEQ ID NO:136), 27) GCAAGAGCAATGGCGTTTCC (SEQ ID NO:137), 28) ATAGGCATAAGCACCAGCGTT (SEQ ID NO:138), 29) GTAAGCATAAGCCTCGGCTCC (SEQ ID NO:139) (25-29 for Poecilotheria); 30) AGCTCCWGCACTTGCNCCACT (SEQ ID NO:140) (30 for Hypochilus).

[0128] All positive clones were sequenced using T7 and Sp6 universal primers. Based on these sequences, clones that had the same translated carboxyl (C) terminal region were grouped with each other. For each group, the clone with the longest insert was selected for complete characterization. Because the inserts contained repetitive nucleotide sequence, a primer walking approach was not feasible. Instead, each selected clone was bidirectionally sequenced in its entirety using the transposon-based GPS-1 Genome Priming System (NEB, Ipswich, Mass.) or EZ-Tn5 Kit (Epicentre, Madison, Wis.).

[0129] Alignment of Egg Case Proteins. Putative Liphistius malayanus ECPs were aligned with Latrodectus hesperus ECP-1 (AY994149) and ECP-2 (DQ341220) using MUSCLE with default settings (Edgar, 2004). The alignment was imported into GeneDoc 2.7.0 (Nicholas and Nicholas, 1997) and physiochemically conserved sites were highlighted.

[0130] Phylogenetic Analyses.

[0131] Phylogenetic analyses were conducted on a dataset of C-terminal encoding regions from published spidroins and those reported here. Spidroins from GenBank were selected to represent different silk glands and phylogenetic diversity. From Araneomorphae, Argiope trifasciata AcSp1 (accession number AY426339), Flag (AF350264), and pyriform (GQ980328; referred to as PySp1 in this paper); Deinopis spinosa Flag (DQ399325), fibroin 1a (DQ399326), fibroin 1b (DQ399327), fibroin 2 (DQ399323), MaSp2a (DQ399328), MaSp2b (DQ399329), MiSp1 (DQ399324), and TuSp1 (AY953073); Diguetia canities MaSp-like (HM752567) and MaSplike2 (HM752565); Dolomedes tenebrosus Dtfib1 (AF350269) and Dtfib2 (AF350270); Latrodectus hesperus AcSp1 (EUO25854), MaSp1 (DQ409057), MaSp2 (EF595245), PySp1 (FJ973621), and TuSp1 (AY953070); Nephila clavipes Flag (AF027973), MaSp1 (AY654292), MaSp2 (M92913), MiSp1 (AF027735), pyriform (GQ980330; referred to here as PySp1), and TuSp1 (AY855102); Peucetia viridans MaSp1 (GU306168); Plectreurys tristis fibroin 1 (AF350281), fibroin 2 (AF350282), fibroin 3 (AF350283), and fibroin 4 (AF350284); and Uloborus diversus AcSp1 (DQ399333), MaSp1 (DQ399331), MaSp2 (DQ399334), MiSp (DQ399332), and TuSp1 (AY953072). From Mygalomorphae, we included Aliatypus gulosus (originally identified as A. plutonis) fibroin 1 (EU117159); Aptostichus sp. fibroin 1 (EU117160) and fibroin 2 (EU117161); Avicularia juruensis spidroin 1a (EU652181; referred to as fib1a in this study), 1b (EU652182; referred to as fib1b in this study), and 1c (EU652183; referred to as fib1c in this study); Bothriocyrtum californicum fibroin 1 (EU117162), fibroin 2 (EU117163), and fibroin 3 (EU117164); and Euagrus chisoseus fibroin 1 (AF350271). The C-terminal regions were aligned using MUSCLE under default parameters (Edgar, 2004) followed by manual adjustment. C-terminal encoding DNA sequences were aligned according to the amino acid alignment with PAL2NAL (Suyama, Torrents, and Bork, 2006) were included.

[0132] Avicularia juruensis spidroin 2 (EU652184) was not included in the final analyses. A Blastn search of the Avicularia spidroin 2 C-terminal region resulted in only two hits. These hits (accessions AF350267, AY365020) were MaSp2 sequences from two species of the orbicularian, Argiope, and had extremely strong E values (<1e-63). Phylogenetic analysis grouped this sequence with araneoid major ampullate sequences (Bittencourt et al., 2010). This result could not be corroborated as close relatives of Avicularia spidroin 2 were not found in any of 10 mygalomorph cDNA libraries (Gatesy et al., 2001; Garb et al., 2007; this study); nor did Prosdocimi et al. (2011) recover major ampullate-like spidroins from the silk gland transcriptome of the mygalomorph, Actinopus sp.

[0133] A phylogenetic analyses was conducted using maximum likelihood (ML) and Bayesian methods. Analyses were conducted on DNA data with gaps coded using the ‘Simple’ method following Simmons and Ochoterena (2000). Analyses were conducted through the CIPRES web server (Miller, Pfeiffer, and Schwartz, 2010). Likelihood searches for the best tree and bootstrap were performed simultaneously with 1000 replicates using RAxML v. 7.2.8 (Stamatakis, 2006 a,b; Stamatakis, Hoover, and Rougemont, 2008). Analyses were performed with the data partitioned by codon position, using the GTR+γ model for each partition, following RAxML program author recommendations. Coded gaps were treated as binary data and as a separate data partition.

[0134] Bayesian analyses were conducted using MrBayes v. 3.1.2 (Huelsenbeck and Ronquist, 2001; Ronquist and Huelsenbeck, 2003). DNA substitution models were determined for each codon position (position 1: HKY+I+γ, position 2: GTR+I+γ, position 3: GTR+γ) using MrModeltest v. 2.3 (Nylander, 2004). The restriction site (binary) model with variable ascertainment bias was used for the coded gap characters (Ronquist, Huelsenbeck, and van der Mark, 2005). Two simultaneous searches were run for at least 10 million generations, with trees and parameters sampled from four MCMC chains every 1000^{th} generation. Partitions (codon positions and binary characters) were unlinked and substitution rates of evolution among partitions were allowed to vary. Analyses were considered complete when the standard deviation of split frequencies between the two searches was below 0.01 (Ronquist, Huelensenbeck, and van der Mark, 2005). The first forty percent of samples were treated as burnin and discarded. Bayesian posterior probabilities (PP) were used to assess clade support.

[0135] Likelihood and Bayesian analyses were also conducted with constraints placed for each gland-associated spidroin group (i.e., minor ampullate, major ampullate, flagelliform, tubuliform, pyriform, and aciniform gland types; FIG. 7; Table A). Our higher-level sampling was not intended to establish monophyly of each of the gland associated spidroin groups; rather the research aimed to determine the phylogenetic placements of the gland associated spidroin groups among spidroins from across the spider phylogeny. For minor ampullate, flagelliform, tubuliform, pyriform, and aciniform glands, spidroins have been reported from only a few species, while major ampullate spidroins are more widely known. The sample of major ampullate spidroins is not comprehensive because the research focused on sampling species for which multiple spidroins had been characterized. Using N and C-terminal sequences, Garb, Ayoub, and Hayashi (2010) recovered monophyletic groups for each of tubuliforms, flagelliforms, and minor ampullates in parsimony and Bayesian analyses. Entelegyne major ampullates spidroins were also recovered as monophyletic in their Bayesian analysis. N-terminal sequences have not been reported for aciniform and pyriform gland associated spidroins, or from any mygalomorph spidroins except for one (Bothriocyrtum californicum fib1). No N-terminal sequences in any of the libraries were recovered; thus this does not include published N-terminal sequences in the analyses. An SH test (Shimodaira and Hasegawa, 1999) using RAxML with the log likelihood values from the ML analyses was preformed to compare the constrained and unconstrained tree topologies.

[0136] The constrained ML spidroin gene tree was reconciled with a species tree based on Coddington et al. (2004), Hedin and Bond (2006), and Ayoub et al. (2007) using the program GeneTree 1.3 (Page, 1998). Spidroins lack a non-spider outgroup. Thus, rooting of the spidroin gene tree was based on the minimization of total gene duplications plus losses.

[0137] Characterization of Spidroin Non-Terminal Regions. Tandem repeats in spidroin protein sequences were identified using XSTREAM under default settings (Newman and Cooper, 2007). Consensus repeat sequences for each spidroin were determined based on 50% majority rule with ambiguities indicated by an X. Representative spidroin repeat lengths were based on repeat consensus lengths and published characterizations of repeats (Table S2). The amino acid compositions of spidroin repetitive regions was also determined with MacVector 7.2 (Accelrys Inc., San Diego, Calif.).

[0138] Using the ML tree from the analysis with gland associated spidroins constrained, continuous character, ancestral state reconstructions were performed for repeat length and amino acid compositions. Reconstructions were done using parsimony under the linear cost assumption in Mesquite v. 2.74 (Maddison and Maddison, 2010). Additionally, the Mesquite module, CoMET, was used to calculate the likelihood of observing the continuous data given the tree under nine different models of evolution (Lee et al., 2006). These models include pure phylogenetic, non-phylogenetic, or punctuated average, in combination with distance, equal, or free (Oakley et al., 2005). The best fitting model was determined by the Akaike Information Criterion (Akaike, 1973). CoMET analyses were run with thresholds of 100 and 1000 for comparison of the pure phylogenetic and punctuated average models. The punctuated average model was favored if the data was indicated to have evolved from branching events where the branch lengths were 100 or, more conservatively, 1000 times longer than their corresponding sister branch lengths (CoMET User's Guide, February 2006). Given that one of the newly characterized spidroins (Hypochilus fib2) and one previously characterized spidroin (Plectreurys fib3; Gatesy et al., 2001) each had two repeat motif types, CoMET analyses was performed using all four combinations of large and small motif lengths. Model choice in these various CoMET analyses was not influenced by these different inputs.

[0139] Liphistius Egg Case Protein Homologs.

[0140] Blastx searches of cDNA clones identified six Liphistius transcripts with top hits to Latrodectus ECP1 (AY994149) and ECP2 (DQ341220). Thus, these Liphistius transcripts were named ECP-like (ECPL; GenBank accessions XXXX-YYYY). No ECP-like transcripts were detected in any of the mygalomorph cDNA libraries or the Hypochilus cDNA library. Liphistius ECPL names and cDNA lengths in base pairs (bp) in parentheses are as follows: ECPL1 (836), ECPL2 (724), ECPL3 (967), ECPL4 (969), ECPL5 (800), ECPL6 (950). With the exception of ECPL5, all of the Liphistius ECPL mRNA sequences included full length coding sequence. Liphistius ECPL transcripts are significantly shorter than Latrodectus ECP1 and ECP2 transcripts, which are 2799 by (coding, 932 AA) and 2478 bp (coding, 825 AA), respectively. The Liphistius ECPLs align to the non-repetitive, cysteine rich, N-terminal region, and lack most of the repetitive region of the Latrodectus ECPs (FIG. 2a). The average pairwise similarity for amino acid sequences (gaps treated as missing) among Liphistius ECPLs is 58.26%, and 33.53% between Liphistius ECPLs and Latrodectus ECPs (FIG. 2b).

[0141] Spidroin Gene Tree.

[0142] One or more spidroins were identified in the cDNA libraries for each taxon in our study, for a total of 13 new spidroins (GenBank accessions XXXX-YYYY). All of the spidroin cDNAs were partial length transcripts, lacking 5′ untranslated sequence, a start codon, N-terminal region sequence, and an unknown amount of repeat region sequence. Spidroin names with cDNA lengths (bp) in parentheses are as follows: Liphistius fib1 (3513); Hypochilus fib1 (2063) and fib2 (2190); Aphonopelma fib1 (1904), fib2 (1634), and fib3 (1464); Poecilotheria fib1 (4617) and fib2 (2437); Antrodiaetus fib1 (1833) and fib2 (5023); Sphodros fib1 (2460); and Hexura fib1 (409). Megahexura fib1 (1257) contained a C-terminal encoding region but lacked a complete repeat; therefore, an additional clone (4897) lacking C-terminal encoding region was sequenced. An overlapping region of these two clones confirmed that they likely represent the same transcript.

[0143] The tree based on the ML analysis with constraints was used (FIGS. 3, 7; Table A) for reconciliation analysis and reconstruction of the evolution of continuous characters (Table S2). While tubuliform, aciniform, pyriform, and flagelliform spidroins were each recovered as monophyletic in all ML and Bayesian analyses, without these constraints, monophyletic groupings of neither major ampullate spidroins nor minor ampullate spidroins were recovered. However, monophyly of both major ampullates and minor ampullates is supported by a previous Bayesian analysis of combined N and C-terminal data (Garb, Ayoub, and Hayashi, 2010). The ML constrained and unconstrained trees were identical at 46 of 58 nodes (FIG. 7). Conflicting relationships were restricted to weakly supported nodes (Table A). The SH (Shimodaira and Hasegawa, 1999) test determined that the constrained topology was not significantly worse than the unconstrained topology. Both the constrained and unconstrained Bayesian consensus trees were unresolved at many nodes (Table A). The ML and Bayesian constrained trees conflicted at only one node, where MiSps were placed sister to Flags in the ML analysis but sister to MaSps in the Bayesian analysis. The bootstrap and posterior probability were weak for either relationship.

[0144] The modest support at many nodes on the spidroin gene tree is not surprising given the small character set available (only C-terminal encoding regions) and the deep divergences among the taxa sampled. Support values for nodes of the spidroin gene tree will likely be improved in the future with inclusion of N-terminal regions, which are available for only a limited subset of published spidroins (Garb, Ayoub, and Hayashi, 2010). Our spidroin gene tree is generated from the broadest phylogenetic sampling of spider lineages to date and thus is the best available topology for reconciliation and ancestral character state reconstruction analyses.

[0145] Reconciliation analysis of the spidroin gene tree with the species tree supported the Liphistius spidroin as sister to all other spidroins (100 events=31 duplications+69 losses; FIG. 3; Table S2). Twenty-five other rootings implied the same number of duplications, but at an increased loss cost. Alternative rootings with Hypochilus fib1, or Hypochilus fib1 plus Liphistius fib1, resulted in the next best reconciliation score (101 events=31 duplications+70 losses) compared to the optimal score (rooting with Liphistius fib1).

[0146] Reciprocally monophyletic araneomorph and mygalomorph spidroin groups were never recovered in the phylogenetic analyses. Based on the most parsimonious rooting, Hypochilus fib1 was found to be sister to all remaining opisthothele spidroins, while Hypochilus fib2 was placed sister to the orbicularian aciniform spidroins (FIG. 3). Mygalomorph spidroins fell into two groups. The most basal mygalomorph group consisted of a tarantula spidroin (Aphonopelma fib1) and an atypoid spidroin (Sphodros fib1), and this Glade of genes was sister to spidroins from the haplogynes, Plectreurys and Diguetia. Most mygalomorph spidroins clustered in a group that was sister to an araneomorph Glade consisting of Plectreurys fib4 and all of the orbicularian pyriform spidroins. This second mygalomorph Glade is characterized by a basal split between atypoid spidroins and non-atypoid sequences; however, relationships within these two groups did not necessarily follow accepted species relationships (Hedin and Bond, 2006).

[0147] Spidroin Repeats.

[0148] XSTREAM analyses identified repeat sequences in 9 of the 13 newly characterized spidroins (spidroin sequences Aphonopelma fib1, Aphonopelma fib2, Aphonopelma fib3 and Hexura fib1 were too short to record iterated repeats). Consensus repeats and their lengths are displayed in FIG. 4 and table S2. Most consensus repeat lengths are between 140 and 200 AA. Hypochilus fib1 and Antrodiaetus fib1 are significantly shorter at 34 and 50 AA, respectively. XSTREAM identified two repeat types in Hypochilus fib2. The consensus length of the first type, corresponding to repeats found in residues 1-309, is 141 AA. In contrast, the consensus repeat length of type two is 8 AA, and corresponds to repeats within residues 350-519. The Megahexura fib1 consensus repeat, at 365 AA, was significantly longer than the repeats from the other newly characterized spidroins described here. Unlike Euagrus fib1, which has a repeat of similar length (342 AA; Gatesy et al., 2001; Garb et al., 2007), the Megahexura fib1 repeat could not be broken down into sub-repeats of approximately ˜180 AA in length.

[0149] Parsimony ancestral state reconstruction of repeat length is shown in FIG. 3. Repeat length ranges for each node are given in table S2. The reconstructed ancestral condition for spidroins is the range 110-245 amino acids. Repeat lengths between 45 and 110 amino acids have evolved at least twice as seen in Plectreurys fib2 and Antrodiaetus fib1. Repeat lengths less than 45 amino acids have evolved convergently in Hypochilus fib1, Diguetia MaSp-likes, Deinopis fib1a and fib1b, and the major ampullates. Convergent evolution of repeat lengths greater than 245 has occurred in some aciniforms, Uloborus TuSp1, Latrodectus PySp1, Megahexura fib1, Euagrus fib1, some MiSps, and some Flags.

[0150] Repeat regions of most spidroins reported here are rich in alanine and serine, but low in glycine. Alanine and serine tandem repeats occur in all of the newly generated spidroin sequences, whereas iterations of other amino acids are less common (FIG. 4). The repeat region compositions of alanine, glycine, and serine for all spidroins analyzed in this study are summarized in table S2. The individual contributions of alanine, glycine, and serine relative to the total composition for each spidroin are displayed in a heat map (FIG. 5). Alanine levels are variable across spidroins. Glycine and serine levels appear to trade-off with each other in that they exhibit large and opposite changes. Glycine deficiency and high serine levels are primarily found in Liphistius, mygalomorph, and haplogyne spidroins, as well as tubuliform, aciniform, and pyriform gland-associated spidroins. By contrast, Deinopis fib1a and fib1b along with major ampullate, minor ampullate, and flagelliform gland-associated spidroins, have high glycine levels but are deficient in serine.

[0151] Continuous character modeling of amino acid composition and repeat lengths given our preferred tree (FIG. 3) were executed using CoMET, with optimal models chosen by the Akaike Information Criterion. For alanine composition, the Punctuated Average/Equal model was selected under the asymmetry threshold of 100, but the Pure-Phylogenetic/Distance model was selected under the asymmetry threshold of 1000. The Punctuated Average/Equal model was selected for glycine composition under thresholds of 100 and 1000. The model selected for serine composition was Pure-Phylogenetic/Distance under both thresholds. For all four combinations of repeat length, the Punctuated Average/Equal model was selected under thresholds of 100 and 1000.

[0152] For each of the newly characterized spidroins, comparison of DNA sequences across repeats of a particular molecule reveal a high degree of sequence similarity among repeats. Hypochilus fib1, fib2 repeat 1, and fib2 repeat 2 showed the lowest average percent identities across repeat types at 85%, 79% and 77%, respectively. Repeats in the mygalomorph spidroin, Antrodiaetus fib1, shared 87% identity. Repeats within each of the six other new spidroins with identifiable repeats were >98% identical. A very low total of 13 non-synonymous differences and 3 synonymous differences occur across the 546 bp long alignment of Liphistius fib1 repeats (FIG. 6).

[0153] Liphistius Silk Gene Diversity.

[0154] The common ancestor of mesotheles and all other spiders is estimated to have existed more than 380 million years ago (Ayoub and Hayashi, 2009). This deep divergence and distant phylogenetic relationship with other spiders makes characterization of silk genes from Mesothelae crucial for obtaining a complete understanding of silk evolution. Mesotheles retain a number of plesiomorphic morphological characters associated with silk spinning (e.g., four pairs of anteriorally-placed spinnerets and single spigot types), and these spiders exhibit little variation in silk fiber types (Haupt and Kovoor, 1993; Haupt, 2003). However, mesotheles use silk for a variety of functions such as construction of their egg cases, burrow, trapdoor, and sensory lines (Shultz, 1987; Haupt and Kovoor, 1993). This combination of silk-spinning traits raises questions about the underlying diversity and function of silk genes and proteins from Mesothelae.

[0155] The Liphistius cDNA library included a considerable diversity of silk protein transcripts. In total, seven silk associated cDNAs were recovered, which approaches the number of different ortholog groups described from a single orb-weaver species and surpasses the number reported from most non-orbicularian araneomorph species (Blasingame et al., 2009; Gatesy et al., 2001; Garb, Ayoub, and Hayashi, 2010). This diversity is surprising given the much simpler silk gland morphologies of Liphistius compared to araneomorph spiders. Six of the seven Liphistius silk cDNAs shared substantial sequence similarity to the ECPs (egg case proteins; Blastx E values <1e-05), which have thus far only been reported from the Western black widow, Latrodectus hesperus (Hu et al., 2005a; Hu et al., 2006b). The six Liphistius egg case protein-like (ECPL) sequences group into three clusters. DNA sequence percent similarities across these three groups range from 49-57%. Within groups, percent similarities (gaps treated as missing) range from 96-100%. All of these sequences exhibit length differences in the protein-coding region, and for one of the groups, the only difference between members was a three-base pair indel. It is possible that some of the ECPL sequences represent allelic differences and/or splice variants.

[0156] The phylogenetic distribution of ECPs and ECPLs implies that egg case proteins either convergently evolved in Liphistius and Latrodectus, or that ECPs were present in the common ancestor of all extant spiders. Given the striking similarity of amino acids over a long region (˜200 residues) and lack of significant similarity to any other proteins in the NCBI nr database, it seems unlikely that ECPs evolved convergently in mesotheles and in theridiid araneomorphs (FIG. 2). Thus, we propose homology of Latrodectus ECPs and Liphistius ECPLs. However, a recent study on silk gland transcriptomes from the mygalomorph, Actinopus sp., and an orbicularian araneomorph, Gasteracantha cancriformis, also did not report ECPs (Prosdocimi et al., 2011). If our hypothesis of homology is correct, ECPs must have been lost independently in many spider lineages. Alternatively, ECPs may be highly restricted in their timing of expression, eluding detection in most cDNA libraries. With the completion of multiple spider genome sequences in the future, it will be possible to discern the presence, absence, or pseudogenization of ECPL genes in various spider taxa, and test the hypothesis of homology between the distantly related ECP and ECPL genes. In particular, synteny could provide additional evidence for orthology of ECPs from Latrodectus and ECPLs from Liphistius.

[0157] Both Latrodectus ECPs and Liphistius ECPLs are cysteine rich, with many cysteine positions conserved within and across species (FIG. 2; Hu et al., 2005a; Hu et al., 2006b). However, Liphistius ECPLs are significantly shorter than Latrodectus ECPs, lacking most of the extensive repetitive region seen in Latrodectus ECPs. While the timing and specificity of ECPL expression in Liphistius is uncertain, the physiochemical conservation of 73% of amino acids at sites that are present in at least one ECPL and ECP suggests that these ECPLs have a cross-linking role in silk fiber formation similar to that proposed for ECPs (Hu et al., 2006b).

[0158] While mesotheles have high ECPL diversity, our cDNA screen suggests a low spidroin diversity, as only a single spidroin type (fib1) was detected in our Liphistius cDNA library. The presence of a spidroin in a mesothele confirms that the spidroin gene family evolved very early in Araneae and has an important role in silk production for all major spider groups that have been studied to date. Whether the Liphistius spidroin forms complexes with the ECPLs is currently unknown. In Latrodectus, ECPs form trimeric complexes with the N-terminal region of tubuliform spidroins (TuSp1) to make the outer silk wrapped around eggs (Hu et al., 2006b). The N-terminal region of Liphistius fib1 has not been characterized, but there are three cysteines in the C-terminal region that may allow for disulfide bonds with the ECPLs, as well as between fib1 monomers. Phylogenetic analyses did not recover a close relationship between Liphistius fib1 and TuSp1, indicating that TuSp1 is the result of spidroin duplication after the split of Opisthothelae from Mesothelae (FIGS. 1 and 3). This implies that ECPs evolved prior to TuSp1. Thus, ECPs likely first were incorporated into silk fibers made with spidroins that were serving a more general purpose, and later became incorporated into Latrodectus tubuliform silk fibers, which are specialized for egg case construction.

[0159] Spidroin Evolution.

[0160] The most parsimonious rooting of the spidroin gene tree using reconciliation analysis indicates that Liphistius fib1 is sister to all other spidroins (FIG. 3). Alternative less parsimonious rootings of the spidroin gene tree are consistent with spidroin gene family duplications occurring prior to the split of mesotheles and opisthotheles (Table S2). While mesotheles may have retained a single spidroin type, opisthotheles underwent an extensive diversification of spidroins very early in their history. Non-monophyly of araneomorph spidroins and of mygalomorph spidroins confirms that duplications occurred prior to the initial split of opisthotheles (Garb et al., 2007; Prosdocimi et al., 2011). The common ancestor of opisthotheles minimally had five spidroin paralogs (FIG. 3). These five paralogous gene lineages are now represented by 1) Hypochilus fib1, 2) a Glade consisting of two mygalomorph spidroins and four haplogyne spidroins, 3) a Glade consisting of orbicularian aciniform spidroins plus Hypochilus fib2 and orbicularian tubuliform spidroins plus Plectreurys fib3, 4) a Glade consisting of the remaining mygalomorph spidroins and orbicularian pyriform spidroins plus Plectreurys fib4, and 5) a Glade consisting of major and minor ampullates, orbicularian flagelliforms, and three additional Deinopis spidroins (FIG. 3).

[0161] The spidroin gene tree allows for inference of the duplication history of spidroins and how the origins of these different gene copies relate to the diversification of silk glands and to the evolution of spigot morphology. Mygalomorphs generally have a single spigot type and silk glands that are largely uniform and acinous in shape, which is thought to be the ancestral condition for spiders (Palmer, Coyle, and Harrison, 1982; Palmer, 1985; Shultz, 1987). Given the diversity of spidroins hypothesized in the opisthothele common ancestor, spidroin diversification preceded the evolution of morphologically distinct silk glands (FIG. 3).

[0162] The last common ancestor of araneomorphs is believed to have possessed ampullate, aciniform, pyriform, and cribellate silk glands and differentiated spigot types for each of these glands (Glatz, 1972; Coddington and Levi, 1991; Platnick et al., 1991). Spidroin ortholog groups associated with these glands are represented in the opisthothele common ancestor, with the exception of the cribellate spidroins, which to date have not been identified (FIG. 3). Additionally, tubuliform and aciniform spidroins are inferred to have resulted from gene duplication before the diversification of Araneomorphae. Tubuliform spigots are a synapomorphy for entelygyne araneomorphs, yet both tubuliform and aciniform spidroins have non-entelegyne relatives, consistent with spidroin diversification preceding the evolution of the morphologically distinct tubuliform gland and spigot type (Coddington, 1989; Platnick et al., 1991; Griswold et al., 1999). Based on our gene tree, the flagelliform, major ampullate, and minor ampullate spidroins appear to have diversified within Entelegynae. For the cDNA libraries from non-entelgyne spiders screened in this study, fibroins closely related to ampullate and flagelliform fibroins were not found.

[0163] No monophyly of mygalomorph spidroins were recovered in the phylogenetic analyses (Garb et al., 2007; Prosdocimi et al., 2011). In contrast to these other studies, our increased taxonomic sampling reveals that both of the mygalomorph spidroin clades include atypoid and non-atypoid spidroins, indicating that ancient spidroin duplicates may be retained in different mygalomorph taxa, as seen in Aphonopelma (FIG. 3). However, some mygalomorph taxa, such as Bothriocyrtum, retain spidroin copies that are very similar to each other, consistent with recent gene duplication or homogenization via concerted evolution in this mygalomorph lineage.

[0164] Mesothele and mygalomorph species have evolved a wide variety of web architectures, including sheet-webs, purse-webs, and trapdoors (Coyle, 1986). Assuming that the spidroins characterized from these taxa are those used to construct their webs, the relationship between different web shapes and the spidroins used to construct them appears to be highly variable. In many cases, closely related spidroin proteins may be used in the construction of very different web architectures. For example, Aliatypus spiders construct trapdoors, yet their spidroin is most closely related to the spidroins of Hexura and Megahexura, which construct sheet-webs (FIG. 3, FIG. 7). On the other hand, very similar architectures may be built from very divergent spidroins. Liphistius, Aliatypus, Aptostichus, and Bothriocyrtum have convergently evolved trapdoors, and the spidroins found from most of these spiders are not closely related. Thus, the ability of mesothele and mygalomorph species to produce different web architectures does not seem to be constrained by the silk proteins produced.

[0165] Evolution of Spidroin Repeat Regions. The analyses reveal very low nucleotide sequence variability among repeat units within a particular spidroin gene. Even Hypochilus fib2 and Plectreurys fib3, which are the only reported spidroins composed of two different repeat types, have high sequence similarity across repeats of the same type. Homogenization of repeats is consistent with concerted evolution via intragenic gene conversion or unequal crossing over, and is a pattern typical of spidroins reported from mygalomorph and araneomorph spiders (Hayashi and Lewis, 2000; Gatesy et al., 2001; Hayashi, Blackledge, and Lewis, 2004; Garb and Hayashi, 2005; Garb et al., 2007; Perry et al., 2010). The homogenization of repeats seen in Liphistius (FIG. 6) indicates that a gene architecture of tandemly arranged, homogenized repeats is an ancestral feature for spidroins.

[0166] The best fitting model determined by CoMET indicates that, on average, for branching events in the spidroin gene tree, one descendant spidroin retains the ancestral repeat length while the other descendant lineage diverges (Oakley et al., 2005). The pattern of punctuated change for repeat length across spidroins could be due to selection for divergent silk mechanical properties that are influenced by repeat motif structure. This divergence among spidroins for repeat length could be facilitated by concerted evolution, where a repeat unit is spread rapidly throughout a spidroin. Ancestral state reconstruction indicates that the archetypal repeat length is ˜180 amino acids (FIG. 3, Table S2). Liphistius fib1 and nearly all mygalomorph spidroin repeats are greater than 157 amino acids; an exception is Antrodiaetus fib1, which is significantly shorter at 50 amino acids in length. The large repeats seen in Euagrus (343 AA) and Megahexura (365 AA) resemble a multiple of the ˜180 AA unit. For example, Euagrus fib1 repeat can be divided into two subrepeats of approximately equal size that are 56% identical (Garb et al., 2007). Based on the alignment of subrepeats, it appears that the large size of the Euagrus fib1 repeat could be due to a concatenation of archetype-sized repeats. Further studies are needed to determine whether ˜180 amino acids is an optimal length for mygalomorph and mesothele silk production. At present, studies on recombinant silk production have focused on number of repeats and fiber formation, but not the influence of repeat size on fiber formation and mechanical properties (Brooks et al., 2008; An et al., 2011).

[0167] Alanine, glycine, and serine are three of the major amino acid components of spider silks and the silks of other arthropods (Hu et al., 2006a; Sutherland et al., 2010); for the spidroins analyzed here, these three amino acids account for, on average, 64% of the total amino acid content of the repetitive region. The percentages of these common amino acids vary considerably across the spidroin gene tree (FIG. 5, Table S2). For most spidroins, alanine levels fall within the range of 20-35%. This is also exhibited by the Liphistius spidroin (26.5% alanine), and ancestral state reconstruction posits 26-36% as the primitive condition for spider silks. The best fitting model for alanine under the most conservative asymmetry threshold in CoMET indicates that the sequence divergence level between spidroin C-terminal regions predicts the divergence level of alanine percentage in the repetitive regions (Oakley et al., 2005).

[0168] The heat map of the percent compositions of serine and glycine across the spidroin gene tree indicates that they contrast strikingly with each other (FIG. 5). Liphistius fib1, most myaglomorph spidroins, and most non-ampullate and non-flagelliform araneomorph spidroins exhibit moderately high serine levels, but are deficient in glycine. In contrast, ampullate and flagelliform spidroins show high levels of glycine and low levels of serine. The best fitting CoMET model determined for glycine percentage suggests that at branching events in the spidroin gene tree, one spidroin retains the ancestral glycine level while the other descendant gene lineage diverges (Oakley et al., 2005). Punctuated evolution of glycine could be due to selection for sequence encoding glycine rich motifs, spread rapidly throughout the gene by concerted evolution, and maintained thereafter by stabilizing selection. Glycine rich motifs are known to contribute to the high tensile strength and extensibility of major ampullate and flagelliform silk fibers, respectively (Hu et al., 2006a). As was the case for alanine, the best fitting model selected for serine percentage indicates that change in serine composition more closely reflects the level of spidroin C-terminal sequence divergence (Oakley et al., 2005). Therefore, while alanine and serine percentages change across spidroins, they do not exhibit the pattern of large change followed by stasis to the extent that is seen in glycine levels.

[0169] Spider silks vary greatly in mechanical performance across species and among silks associated with different gland types (Swanson et al., 2006; Blackledge and Hayashi, 2006; Boutry and Blackledge, 2010). Tensile testing of silks from representatives of Liphistius and mygalomorphs has shown that these silks have lower tensile strength than major ampullate silks and lack the high extensibility of flagelliform silks (Swanson et al., 2009; Blackledge and Hayashi, 2006). Thus far, silk mechanical properties have only been tested on a few mesothele species and theraphosid mygalomorphs (tarantulas). Our study reveals mygalomorph silk proteins with distinct molecular architectures that may enable unique, and perhaps exceptional, mechanical properties. For example, Antrodiaetus expresses two silk encoding genes, one of which (fib1) encodes a protein with a glycine percentage of ˜30%, which is more comparable to major ampullate and minor ampullate silks (˜24-45%) than theraphosid silks (<10%). Also, the repeat length encoded by Megahexura fib1 is −365 amino acids, which is well above the known range of repeat lengths encoded by theraphosid spidroin genes (157-186 amino acids). Thus, broader examination of silk mechanical properties in different mygalomorphs is warranted.

[0170] Mesotheles and mygalomorphs mostly use their silks to line their burrows, construct retreats, make egg sacs, and extend their sensory area. Exceptionally extensible or strong silk may not be advantageous for these purposes (Coyle, 1986). These spiders rely on their size, power, and robust fangs to capture ground dwelling prey, and there is little need for silks capable of absorbing kinetic energy from flying insects. Instead, selection in mesothele and mygalomorph lineages may favor durable silks that are optimized for stability in subterranean conditions or for sensitivity in detection of vibrations from prey. The new silk genes found can be used to further investigate silk mechanical and functional properties and how these relate to the subterranean lifestyle of mesotheles and mygalomorphs.

[0171] Analysis of silk gland expression libraries from mesothele, paleocribellate, and mygalomorph spiders greatly clarifies the evolutionary history of silk in Araneae. The discovery of mesothele ECPL sequences that share conserved regions with Latrodectus ECPs suggests that these loci comprise a gene family which has been associated with silk production in spiders for >380 million years. Further research is needed to determine the phylogenetic breadth of this gene family in spiders, as well as how ECPs functionally interact with members of the spidroin gene family. Phylogenetic analysis of our new data from Mesothelae, Mygalomorphae, and Hypochilus suggests that the most recent common ancestor of all extant spiders had a single spidroin, and that diversification of spidroins by gene duplication had already occurred prior to the divergence of mygalomorphs and araneomorphs. The repeat regions vary considerably in structure and amino acid composition across different spidroin types. The punctuated pattern of change in repeat length and glycine percentage could be due to selection for improved mechanical properties enabled by these characteristics, facilitated by concerted evolution quickly spreading desirable protein coding motifs throughout a spidroin gene.

[0172] Mesotheles and mygalomorphs construct a wide variety of web shapes and burrow entrance architectures. Considering the ecological function of mygalomorph and mesothele silks, selection on silk from these spiders may have favored properties associated with the largely subterranean niche they fill, such as durability for burrow maintenance and vibration transmission for prey capture (Coyle, 1986). The diversity of silk genes uncovered in mesotheles and mygalomorphs highlights the need for further exploration into the phylogenetic diversity of spiders for silk genes that encode unique silk mechanical properties.

TABLE A
Node support (ML bootstrap and Bayesian posterior probabilities) for
phylogenetic analyses. Node numbers refer to the phylogeny in FIGS.
3 and 7. Dashes refer to nodes with <50 BS or 0.5 PP support.

| | |
|---|---|
| ML | Bayes |

| | Con- | Uncon- | Con- | Uncon- |
|---|---|---|---|---|
| Node# | strained (C) | strained | strained (C) | strained |
| 1 | — | — | — | — |
| 3 | — | — | — | — |
| 5 | — | — | 0.78 | 0.8 |
| 6 | — | — | — | — |
| 7 | 65 | 67 | 0.97 | 0.98 |
| 10 | 83 | 79 | 1.0 | 0.99 |
| 11 | 92 | 89 | 1.0 | 1.0 |
| 14 | 87 | 87 | 1.0 | 1.0 |
| 17 | — | — | — | — |
| 18 | — | — | — | — |
| 19 | — | — | 0.57 | 0.66 |
| 21 | C, 97 | 90 | C, 1.0 | 1.0 |
| 23 | — | 53 | — | 0.56 |
| 26 | — | — | 0.54 | 0.5 |
| 28 | C, 74 | — | C, 1.0 | 0.97 |
| 30 | — | — | 0.51 | 0.53 |
| 32 | 68 | 56 | 0.94 | 0.93 |
| 35 | — | — | 0.74 | 0.77 |
| 36 | — | — | — | — |
| 37 | — | — | 0.59 | 0.62 |
| 39 | C, 94 | 92 | C, 1.0 | 1.0 |
| 41 | 75 | 75 | 0.94 | 0.95 |
| 44 | — | — | — | — |
| 45 | — | — | — | — |
| 47 | — | — | 0.65 | 0.59 |
| 49 | — | — | — | — |
| 51 | 55 | 52 | 0.91 | 0.9 |
| 54 | — | — | 0.67 | 0.67 |
| 56 | — | — | — | 0.5 |
| 58 | — | — | — | — |
| 59 | 82 | 82 | 1.0 | 1.0 |
| 61 | 83 | 80 | 1.0 | 1.0 |
| 63 | 93 | 93 | 1.0 | 1.0 |
| 65 | 56 | — | — | — |
| 68 | — | — | — | — |
| 69 | 70 | 72 | 0.93 | 0.93 |
| 72 | — | — | 0.94 | 0.95 |
| 74 | 59 | 54 | 0.97 | 0.97 |
| 76 | 98 | 97 | 1.0 | 1.0 |
| 79 | — | — | 0.98 | 0.98 |
| 80 | — | — | 0.84 | 0.61 |
| 82 | 100 | 100 | 1.0 | 1.0 |
| 85 | — | — | 0.61 | 0.5 |
| 86 | C, — | — | C, 1.0 | — |
| 87 | 82 | 69 | 1.0 | 0.99 |
| 89 | 67 | 61 | 0.81 | 0.82 |
| 91 | 98 | 98 | 1.0 | 1.0 |
| 94 | — | — | 0.94 | 0.71 |
| 95 | 63 | — | 0.99 | 0.94 |
| 97 | 95 | 94 | 1.0 | 1.0 |
| 100 | 82 | 77 | 0.96 | 0.96 |
| 101 | 100 | 100 | 1.0 | 1.0 |
| 104 | 99 | 99 | 1.0 | 1.0 |
| 107 | — | — | — | — |
| 108 | C, 55 | — | C, 1.0 | — |
| 110 | — | — | 0.69 | — |
| 113 | C, 91 | — | C, 1.0 | 0.99 |
| 115 | 100 | 100 | 1.0 | 1.0 |

TABLE B
Continuous character data and alternative
reconciliation based outgroups for ML constrained tree.
Citations indicate source of repeat length characterization.

| | | | | | | Alternative |
|---|---|---|---|---|---|---|
| | | | | | | Rooting/ |
| | | | | | | Outgroup |
| | | | | Repeat | | duplication/ |
| | | | | Length | | loss/deep |
| | | | | (long/short | Repeat Length | coalescence |
| Node # | Alanine % | Glycine % | Serine % | combinations) | Characterization | events |
| 1 | 26.5-36.44 | 3.15-12.83 | 17.18-19.03 | 180-182/179-182 | | |
| 2 (Liphistius_fib1) | 26.5 | 3.15 | 19.03 | 182 | This study | 31/69/81 |
| 3 | 26.5-36.44 | 9.69-12.83 | 17.18-18.94 | 180-182/179-180 | | |
| 4 (Hypochilus_fib1) | 40.28 | 23.7 | 9.72 | 34 | This study | 31/70/82 |
| 5 | 26.5-36.44 | 9.69-12.83 | 17.18-18.94 | 180-182/179-180 | | 31/70/82 |
| 6 | 26.5-36.44 | 9.69-12.83 | 17.18-18.94 | 180-182/179-180 | | 31/71/83 |
| 7 | 26.5-36.44 | 7.13 | 18.94 | ? | | |
| 8 (Aphonopelma_fib1) | 8.15 | 7.13 | 18.94 | ? | This study | |
| 9 (Sphodros_fib1) | 39.07 | 4.52 | 24.78 | 192 | This study | |
| 10 | 29.1-36.44 | 13.15-19.0 | 12.64-18.94 | 66-126 | | |
| 11 | 29.1-36.44 | 13.15-19.0 | 12.64-18.94 | 66-126 | | |
| 12 (Plectreurys_fib2) | 29.1 | 13.15 | 20.09 | 66 | Gatesy et al. | |
| | | | | | (2001) | |
| 13 (Plectreurys_fib1) | 41.19 | 27.1 | 12.64 | 126 | Gatesy et al. | |
| | | | | | (2001) | |
| 14 | 36.44 | 19 | 11.74 | 39 | | |
| 15 | 36.44 | 30.97 | 11.74 | 39 | Garb, Ayoub, | |
| (Diguetia_MaSplike) | | | | | and Hayashi | |
| | | | | | (2010) | |
| 16 | 54.75 | 19 | 9.95 | 24 | Garb, Ayoub, | |
| (Diguetia_MaSplike2) | | | | | and Hayashi | |
| | | | | | (2010) | |
| 17 | 25.26-29.65 | 9.69-12.83 | 17.18-18.94 | 180-182/179-180 | | 31/71/83 |
| 18 | 25.26-29.65 | 9.69-12.83 | 20.53-21.46 | 180-206/179-180 | | 31/72/84 |
| 19 | 25.26-29.65 | 9.69-12.83 | 20.53-21.46 | 180-206/179-180 | | 31/74/86 |
| 20 (Hypochilus_fib2) | 33.68 | 13.51 | 20.53 | 141/8 | This study | |
| 21 | 14.67 | 9.69-12.83 | 20.53-21.46 | 200-357 | | |
| 22 (Uloborus_AcSp1) | 14.67 | 7.29 | 26.63 | 357 | Garb et al. | |
| | | | | | (2006) | |
| 23 | 14.15 | 12.83 | 20.53-21.46 | 200-357 | | |
| 24 | 13.43 | 12.83 | 13.63 | 376 | Vasanthavada et | |
| (Latrodectus_AcSp1) | | | | | al. (2007) | |
| 25 (Argiope_AcSp1) | 14.15 | 15.5 | 21.46 | 200 | Hayashi, | |
| | | | | | Blackledge, and | |
| | | | | | Lewis (2004) | |
| 26 | 25.26-29.65 | 9.69 | 22.11-29.91 | 200-206/179-180 | | 31/74/86 |
| 27 (Plectreurys_fib3) | 25.26 | 2.14 | 30.94 | 206/46 | Gatesy et al. | |
| | | | | | (2001) | |
| 28 | 29.21-29.65 | 9.69 | 22.11-29.91 | 200-206/184-200 | | |
| 29 (Uloborus_TuSp1) | 29.65 | 9.69 | 29.91 | 302 | Garb et al. | |
| | | | | | (2006) | |
| 30 | 29.21-29.65 | 9.69 | 22.11-26.86 | 200/184-200 | | |
| 31 (Deinopis_TuSp1) | 34.5 | 11.78 | 20.34 | 200 | Garb et al. | |
| | | | | | (2006) | |
| 32 | 29.21 | 8.52 | 22.11-26.86 | 184 | | |
| 33 | 26.01 | 6.75 | 26.86 | 184 | Garb et al. | |
| (Latrodectus_TuSp1) | | | | | (2007) | |
| 34 (Nephila_TuSp1) | 29.21 | 8.52 | 22.11 | 171 | Tian and Lewis | |
| | | | | | (2005) | |
| 35 | 24.23-27.59 | 9.69-12.83 | 17.18-18.94 | 180-182/179-180 | | 31/72/84 |
| 36 | 22.44-27.59 | 8.25-12.83 | 17.18-18.94 | 180-182/179-180 | | 31/73/85 |
| 37 | 22.44-27.59 | 8.25-12.83 | 17.18-18.94 | 226-239 | | |
| 38 (Plectreurys_fib4) | 22.44 | 13.85 | 17.18 | 239 | Gatesy et al. | |
| | | | | | (2001) | |
| 39 | 22.44-27.59 | 1.97-5.41 | 17.18-18.94 | 226-239 | | |
| 40 | 45.15 | 0 | 7.26 | 316 | Blasingame et | |
| (Latrodectus_PySp1) | | | | | al. (2009) | |
| 41 | 17.69 | 1.97-5.41 | 26.6 | ? | | |
| 42 (Argiope_PySp1) | 17.69 | 5.41 | 27.76 | ? | Perry et al. | |
| | | | | | (2010) | |
| 43 (Nephila_PySp1) | 13.79 | 1.97 | 26.6 | 226 | Perry et al. | |
| | | | | | (2010) | |
| 44 | 22.44-27.59 | 8.25-12.83 | 17.18-21.38 | 179-182/179-180 | | |
| 45 | 23.9-28.39 | 8.25-12.83 | 17.18-21.38 | 179-182/179-180 | | |
| 46 (Antrodiaetus_fib1) | 28.39 | 29.66 | 2.97 | 50 | This study | |
| 47 | 23.9-28.39 | 6.23-10.53 | 22.09-23.07 | 181-194 | | |
| 48 (Antrodiaetus_fib2) | 23.9 | 4.92 | 31.45 | 194 | This study | |
| 49 | 35.17 | 6.23-10.53 | 22.09-23.07 | 181-194 | | |
| 50 (Megahexura_fib1) | 38.07 | 10.53 | 22.09 | 365 | This study | |
| 51 | ? | ? | ? | ? | | |
| 52 (Aliatypus_fib1) | 35.17 | 6.23 | 23.07 | 181 | Garb et al. | |
| | | | | | (2007) | |
| 53 (Hexura_fib1) | ? | ? | ? | ? | This study | |
| 54 | 20.7-27.59 | 8.25-8.9 | 19.37-21.38 | 179 | | |
| 55 (Poecilotheria_fib1) | 20.7 | 6.46 | 23.57 | 157 | This study | |
| 56 | 20.7-27.59 | 8.25-8.9 | 19.37-21.38 | ? | | |
| 57 (Aphonopelma_fib2) | 17.8 | 8.9 | 19.37 | ? | This study | |
| 58 | 20.7-33.23 | 8.25-8.9 | 21.38 | 179 | | |
| 59 | 26.03-33.23 | 8.25-8.9 | 21.38 | 179 | | |
| 60 (Poecilotheria_fib2) | 33.23 | 10.15 | 21.38 | 166 | This study | |
| 61 | 26.03-33.23 | 8.25 | 21.38 | ? | | |
| 62 (Aphonopelma_fib3) | 26.03 | 8.25 | 20.32 | ? | This study | |
| 63 | 30.65-34.51 | 8.24-8.25 | 21.74-24.9 | 179-183 | | |
| 64 (Avicularia_fib1a) | 34.51 | 8.24 | 24.9 | 183 | Bittencourt et | |
| | | | | | al. (2010) | |
| 65 | 30.65-34.51 | 8.24-8.25 | 21.74-24.9 | 179-183 | | |
| 66 (Avicularia_fib1b) | 30.65 | 9.57 | 21.74 | 177 | Bittencourt et | |
| | | | | | al. (2010) | |
| 67 (Avicularia_fib1c) | 36.95 | 5.99 | 25.2 | 186 | Bittencourt et | |
| | | | | | al. (2010) | |
| 68 | 20.7-33.23 | 6.98-8.9 | 22.58-22.81 | 179 | | |
| 69 | 20.7-33.23 | 6.98-8.9 | 22.81 | 179 | | |
| 70 (Euagrus_fib1) | 38.57 | 11.75 | 24.92 | 343 | Gatesy et al. | |
| | | | | | (2001) | |
| 71 (Aptostichus_fib1) | 18.02 | 6.98 | 22.81 | 169 | Garb et al. | |
| | | | | | (2007) | |
| 72 | 20.7-33.23 | 6.07-6.19 | 22.58-22.81 | 179 | | |
| 73 (Aptostichus_fib2) | 19.97 | 6.07 | 23 | 179 | Garb et al. | |
| | | | | | (2007) | |
| 74 | 30.43-38.25 | 6.07-6.19 | 22.58-22.81 | 179 | | |
| 75 | 38.25 | 6.19 | 21.04 | 183 | Garb et al. | |
| (Bothriocyrtum_fib3) | | | | | (2007) | |
| 76 | 30.43-38.25 | 4.66 | 22.58-22.81 | 175 | | |
| 77 | 38.28 | 4.66 | 22.58 | 175 | Garb et al. | |
| (Bothriocyrtum_fib2) | | | | | (2007) | |
| 78 | 30.43 | 3.52 | 23.4 | 171 | Garb et al. | |
| (Bothriocyrtum_fib1) | | | | | (2007) | |
| 79 | 24.23-27.59 | 40.22-40.91 | 6.9-18.94 | 180-182/179-180 | | 31/73/85 |
| 80 | 24.23-27.59 | 40.91 | 6.9-18.94 | 180/179-180 | | 31/77/89 |
| 81 (Deinopis_fib2) | 16.48 | 40.91 | 19.13 | 180 | Garb et al. | 31/84/96 |
| | | | | | (2006) | |
| 82 | 27.59 | 46.06 | 6.9 | 2 | | 31/84/96 |
| 83 (Deinopis_fib1b) | 27.59 | 46.06 | 6.9 | 2 | Garb et al. | 31/91/103 |
| | | | | | (2006) | |
| 84 (Deinopis_fib1a) | 31.14 | 48.23 | 4.86 | 2 | Garb et al. | 31/91/103 |
| | | | | | (2006) | |
| 85 | 24.23-27.59 | 40.22-40.91 | 6.7-6.73 | 180-182/179-180 | | 31/77/89 |
| 86 | 24.23-27.59 | 40.22-40.91 | 6.7-6.73 | 33-34 | | 31/81/93 |
| 87 | 24.23-32.25 | 40.22-40.91 | 6.12-6.73 | 33-34 | | 31/85/97 |
| 88 (Nephila_MaSp1) | 33.1 | 44.13 | 3.56 | 30 | Gatesy et al. | 31/92/104 |
| | | | | | (2001) | |
| 89 | 24.23-32.25 | 35.83-40.91 | 6.12-6.73 | 33-34 | | 31/92/104 |
| 90 (Nephila_MaSp2) | 22.26 | 35.09 | 7.55 | 40 | Gatesy et al. | |
| | | | | | (2001) | |
| 91 | 32.25 | 35.83-40.91 | 6.12 | 33-34 | | |
| 92 | 32.25 | 35.83 | 6.12 | 24 | Garb et al. | |
| (Latrodectus_MaSp2) | | | | | (2007) | |
| 93 | 34.85 | 44.47 | 1.86 | 34 | Garb et al. | |
| (Latrodectus_MaSp1) | | | | | (2007) | |
| 94 | 24.23-26.5 | 40.22-40.91 | 6.7-6.73 | 33-34 | | 31/85/97 |
| 95 | 24.23-26.5 | 43.55-43.6 | 6.7-6.73 | 33 | | |
| 96 (Peucetia_MaSp1) | 24.23 | 44.9 | 8.42 | 32 | Pérez-Rigueiro | |
| | | | | | et al. (2010) | |
| 97 | 24.23-26.5 | 43.55-43.6 | 6.7-6.73 | 33 | | |
| 98 (Dolomedes_fib1) | 23.12 | 43.55 | 6.51 | 33 | Gatesy et al. | |
| | | | | | (2001) | |
| 99 (Dolomedes_fib2) | 28.96 | 43.6 | 6.73 | 33 | Gatesy et al. | |
| | | | | | (2001) | |
| 100 | 24.23-26.5 | 36.22-40.91 | 6.7-6.73 | 33-34 | | |
| 101 | 23.61 | 36.22 | 4.46 | 33-34 | | |
| 102 | 19.41 | 36.22 | 4.45 | 38 | Garb et al. | |
| (Deinopis_MaSp2a) | | | | | (2006) | |
| 103 | 23.61 | 32.97 | 4.46 | 32 | Garb et al. | |
| (Deinopis_MaSp2b) | | | | | (2006) | |
| 104 | 26.5 | 36.22-40.91 | 6.84 | 33-34 | | |
| 105 (Uloborus_MaSp1) | 26.92 | 44.23 | 8.65 | 36 | Garb et al. | |
| | | | | | (2006) | |
| 106 (Uloborus_MaSp2) | 26.5 | 30.77 | 6.84 | 28 | Garb et al. | |
| | | | | | (2006) | |
| 107 | 24.23-27.59 | 40.22-40.91 | 6.7-6.73 | 321 | | 31/81/93 |
| 108 | 24.23-35.47 | 40.22 | 6.7-6.73 | 321-335 | | 31/86/98 |
| 109 (Nephila_MiSp1) | 36.52 | 40.22 | 4.83 | 627 | Gatesy et al. | |
| | | | | | (2001) | |
| 110 | 24.23-35.47 | 34.16 | 10.73 | 321-335 | | |
| 111 (Deinopis_MiSp1) | 22.83 | 24.07 | 13.4 | 335 | Garb et al. | |
| | | | | | (2006) | |
| 112 (Uloborus_MiSp) | 35.47 | 34.16 | 10.73 | 147 | Garb et al. | |
| | | | | | (2006) | |
| 113 | 5.49-12.01 | 45.58 | 6.7-6.73 | 321 | | 31/86/98 |
| 114 (Deinopis_Flag) | 3.49 | 45.58 | 6.7 | 321 | Garb et al. | |
| | | | | | (2006) | |
| 115 | 5.49-12.01 | 53 | 6.7-6.73 | 321 | | |
| 116 (Nephila_Flag) | 5.49 | 55.24 | 8.05 | 420 | Gatesy et al. | |
| | | | | | (2001) | |
| 117 (Argiope_Flag) | 12.01 | 53 | 5.3 | 134 | Gatesy et al. | |
| | | | | | (2001) | |

[0173] A number of non-limiting examples and embodiment have been described. The foregoing description is not intended to limit the invention and one of skill in the art will readily ascertain additional embodiments encompassed by the following claims in view of the foregoing description.

1. A substantially purified polypeptide comprising an N-terminus sequence that is about 80-150 amino acids in length and having at least about 90% identity to SEQ ID NO:5 from amino acid position 71 to 151 followed by a sequence of SEQ ID NO:5 from position 1358-1384, wherein SEQ ID NO:5 from position 1358-1384 is preceded and/or followed by a glycine and alanine rich region and having a C-terminal region of about 50-100 amino acids in length and having at least about 90% identity to SEQ ID NO:5 from position 2085 to 2141, wherein the polypeptide has a property selected from the group consisting of (i) a Young's modulus of about 3.94 GPa, (ii) an Ultimate Strength of about 139 MPa, (iii) an Extensibility of about 0.818 mm/mm, (iv) a Toughness of about 66.7 MPa and (v) any combination of (i)-(iv).

2. The polypeptide of claim 1, wherein the polypeptide comprises a sequence that is at least 95% identical to a sequence selected from the group consisting of SEQ ID NO:3, 5, 73, 75, 77, 79, 81 and 83.

3. The polypeptide of claim 1, wherein the polypeptide comprises a sequence selected from the group consisting of SEQ ID NO:3, 5, 73, 75, 77, 79, 81 and 83.

4. The polypeptide of claim 1, wherein the polypeptide comprises SEQ ID NO:5.

5. The polypeptide of claim 1, wherein the polypeptide consists of SEQ ID NO:5.

6. A substantially purified polypeptide comprising an N-terminal region that is at least 60% identical to SEQ ID NO:7 from amino acid 1 to about 167, followed by a tandem array of 16-20 repeat units of about 200-370 amino acid in length and having a C-terminal domain comprising at least 40% identity to SEQ ID NO:7 from about amino acid 6236 to 6333, wherein the polypeptide has a property selected from the group consisting of (i) a Young's modulus of about 9.8 to 10.4 GPa, (ii) an Ultimate strength of about 636 to 687 MPa, (iii) an Extensibility of about 0.505 to 0.83 mm/mm, (iv) a Toughness of about 230 MPa to 376 MPa and (v) any combination of (i)-(iv).

7. The polypeptide of claim 6, wherein the polypeptide is about 4400-6300 amino acids in length and about 430 to about 630 kiloDaltons in molecular weight.

8. The polypeptide of claim 7, wherein the polypeptide is at least 90% identical to SEQ ID NO:7 or 87.

9. The polypeptide of claim 8, wherein the polypeptide is at least 95% identical to SEQ ID NO:7 or 87.

10. The polypeptide of claim 9, wherein the polypeptide comprises SEQ ID NO:7.

11. The polypeptide of claim 9, wherein the polypeptide comprises SEQ ID NO:87.

12. A polynucleotide encoding any one of the polypeptides of claim 1 or 6.

13. A vector comprising the polynucleotide of claim 12.

14. A host cell comprising the polynucleotide of claim 12.

15. A substantially purified polypeptide comprising a sequence selected from the group consisting of SEQ ID NO:3, 5, 7, 9, 11, 13, 15, 17, 19, 21, 23, 25, 27, 29, 31, 33, 35, 37, 39, 41, 43, 45, 47, 49, 51, 53, 55, 57, 59, 61, 63, 65, 67, 69, 71, 73, 75, 77, 79, 81, 83, 85, 87, 89, 91, 93, 95, 97, 99, 101, 103, 105 and 107.

16. An isolated polynucleotide molecule selected from the group consisting of:
a) a polynucleotide molecule comprising a nucleotide sequence which is at least 80% identical to the nucleotide sequence of SEQ ID NO: 2, 4, 6, 8, 10, 12, 14, 16, 18, 20, 22, 24, 26, 28, 30, 32, 34, 36, 38, 40, 42, 44, 46, 48, 50, 52, 54, 56, 58, 60, 62, 64, 66, 68, 70, 72, 74, 76, 78, 80, 82, 84, 86, 88, 90, 92, 94, 96, 98, 100, 102, 104, or 106;
b) a polynucleotide molecule which encodes a polypeptide comprising the amino acid sequence of SEQ ID NO: 3, 5, 7, 9, 11, 13, 15, 17, 19, 21, 23, 25, 27, 29, 31, 33, 35, 37, 39, 41, 43, 45, 47, 49, 51, 53, 55, 57, 59, 61, 63, 65, 67, 69, 71, 73, 75, 77, 79, 81, 83, 85, 87, 89, 91, 93, 95, 97, 99, 101, 103, 105 and 107; and
c) a polynucleotide molecule which encodes a naturally occurring allelic variant of a polypeptide comprising the amino acid sequence of SEQ ID NO: 3, 5, 7, 9, 11, 13, 15, 17, 19, 21, 23, 25, 27, 29, 31, 33, 35, 37, 39, 41, 43, 45, 47, 49, 51, 53, 55, 57, 59, 61, 63, 65, 67, 69, 71, 73, 75, 77, 79, 81, 83, 85, 87, 89, 91, 93, 95, 97, 99, 101, 103, 105 and 107, wherein the polynucleotide molecule hybridizes to a polynucleotide molecule comprising SEQ ID NO: 2, 4, 6, 8, 10, 12, 14, 16, 18, 20, 22, 24, 26, 28, 30, 32, 34, 36, 38, 40, 42, 44, 46, 48, 50, 52, 54, 56, 58, 60, 62, 64, 66, 68, 70, 72, 74, 76, 78, 80, 82, 84, 86, 88, 90, 92, 94, 96, 98, 100, 102, 104, or 106, or a complement thereof, under moderate to highly stringent conditions.

17-22. (canceled)

23. A method for producing a silk dragline, the method comprising culturing the recombinant host cell of claim 14 under conditions suitable for expression of the polypeptide, such that the polypeptide is produced.

24. A recombinant silk fiber comprising a polypeptide of any one of claim 1 or 6.

25. A copolymer fiber comprising at least two polypeptides of any of claim 1 or 6.

26. A material made from a polypeptide of claim 23.

27. The material of claim 26, wherein the material is a textile material.

28. The material of claim 26, wherein the material is a biomaterial.

The application's sequence listing, which the Patent Office published only in electronic form, follows.

SEQUENCE LISTING (107 sequences)

SEQ ID NO: 1 - protein, 3 aa, Artificial Sequence
  Consensus sequence
  MISC_FEATURE (2)..(2): Xaa is alanine, tyrosine, leucine, or glutamine
GXG

SEQ ID NO: 2 - DNA, 5652 bp, Latrodectus hesperus
  CDS (3)..(5567)
gcttcgtctctttagatgccgccagtgtctgggacagcacagcaacagctgaagcttttattggaagcttcaattctggcatggaaagatctggagtgttgtcacggtctcagatggatgatatctcatccattagcgacacaataatatctgccattgaaagaaacccaaacaactccaaatcgaaattgcaagctttaaacatggcttttgcatcatcagtttcggaaattgcgttctctgagaacaatggaatttcaaacagtgctaaaatacaagccattattgatgcactcagaggagcatttctgcaaactattggaacggttgatcaaacctttttgaatgaaatttctagtctcgttaaaatgttttcacaggtttcagcagaaaatgcagtttcaacaagtgctggagcagcagctacttccattggaagcagtggtggtggttacggacagcaaagtggtgggtacattcaaggttcagctgcgtcagcctcatcttcagcaggagcaagaacctctgcaggcactactggatattctgctggttcaacacaagtctcttccactgtatcttctacaagccaagcagcgcaatcagcaaccgcaaccagtcagtatggccaagcacaaagtgctggatcatatagtaacgcggctgcaggagctacaggtgcttatgcaggaggatacggtcagggtagtagtgctgcaacaggtgctggagcaggaggatatggtcaaggtgctggaggctacggacaaggtgctggttctgcagcaggtgcggctgctggtgcaggagtaggaggatatggccaaggtgctggaggctacggacaaggtgccggtgctgcagcaggtgcagctgctggtgcaggagccggaggttatggtcaaggtgctggaggctacggacaaggtgctggcgctgcagcaggagcagcagctgttgcaggagcaggaggatatggtcaaggtgctggaggctacggacaaggtgctggtgctgcagcaggtgcagctgctggtgcaggatccggaggatatggtcaaggtgctggaggctacggacaaggtgctggcgctgcagcaggagcaggaggatatggtcaaggtgctggaggctacggacaaggtgctggtgctgcagcaggtgcagctgctggtgcaggagccggaggatatggtcaaggtgctggaggctacggacaaggtgctggcgctgcagcaggagcagcagctggtgcaggagcaggaggatatggtcaaggtgctggaggctacggacaaggtgctggtgctgcagcaggtgcagctgctggtgcaggagccggaggatatggtcaaggtgctggaggatacggacaaggtgctggtgctgcagctggtgcaggagctggaggatatggacaaggtgctggttctgcagcaggtgccggagcaagaggatatggccaaggtgctggaggctatggacaaggtgctggttctgcagcaggtgcggctgctggtgcaggagccggaggatatggtcaaggtgctggaggatacggacaaggtgctggtgctgcagctggtgcaggagcaggaggatatggacgaggtgctggttctgcagcaggtgcaggagcaagaggatatggccaaggtgctggaggctatggacaaggtgctggttctgcagcaggtgcggctgctggttctgcagcaggtgcggctgctggttcaggagcaggaggatatggacaaggagctggaggctatggacaaggagctggtgctggtgcaggaggatatggtcaaggtgctggtgctgcaacaggtgcagcagctggagcaggggcaggtggatatggccaaggtgctgggggctacggacaaggttctggtgctgcagctggagcaggaggatatggtcaaggatctcaaggctacggacaaggtgctgctgcaacctcatcggctgcagcaggggcatcttcaactggttatacagaaagacaaaatgaagttgtcactacagttactactacacgacaggaaactgcggattatgctcaaaaacaggcagccagtgcagcgtcagcagcaacctctgcatctgcaggagcttacggccaaagtgctggaggatacggaagaggagctggtgctggagccagaggatacggacaaggtgctggtgctggagccggaggatacggacaaggtgctggtgctggagctggacgatacgggcaaggtgccggtgctgcagcaggtgcagccgcaggtgctggagcaggaggttatggtcaaggagctggaggttatggaagaggccaaggagctggtgcgggtgctggagcaggaggatatggacaaggtgctggagctggtgctgcagcaggttcagccgcaagtgctggagcaggaggttatggccaaggagctggaggttatggaagaggccaaggagctggtgcaggagcgggtgctggagctggtgctgcagcaggtgcagccgcaagtgctggagcaggaggttatggccaaggagctggaggttatggaagaggccaaggagctggtgcaggagcgggtgctggagctggtgctgcagcaggtgcagccgcaagtgctggagcaggaggttatggccaaggagctggaggctatggacaaggacaaggtgctggtgctgcagcaggtgcagccgcaggtgctggagcaggaggttatggccaaggagctggaggctatggacaaggcaaaggtgctggtgctgcagcaggtgcagccgcaggtgctggagcaggaggttatggtcaaggagctggaggttatggaagaggccaaggagctggtgcaggagctggtgtgggtgctgaagcaggaggatatggacaaggtgctggtgctggtgctgcagcaggtgcagccgcaagtgctggagcaggaggttatggccaaggagctggaggttatggaagaggccaaggagctggtgcaggagcgggtgctggagctggtgctgcagcaggtgcagccgcaagtgctgtagcaggaggttatggccaaggagctggaggctatggacaaggacaaggtgctggtgctgcagcaggtgcagccgcaggtgctggagcaggaggttatggccaaggagctggaggctatggacaaggccaaggagctggtgcaagagcgggtgctggagctggtgctgcagcaggtgcagccgcaagtgctggagcaggaggttatggccaaggagctggaggttatggaagaggccaaggagctggtgcaggagcgggtgctggagctggtgctgtagcaggtgcagccgcaagtgctggagcaggagtttatggccaaggagctggaggttatggaagaggccaaggagctggtgcaggtgcgggtgctggagcaggaggatacggacaaggtgctggagctggtgctgccgcaggtgctggagcaggaggatacagacaaggtgctggagctgatgctgccgcaggtgctggagctggaggttatggaagaggccaaggagctggtgcaggagcgggtgctggagctggtgctgcagcaggtgcagccgcaagtgctggagcaggaggttatggccaaggagctggaggctatggacaaggccaaggtgctggtgctgcagcaggtgcagctgcaagtgctggagcaggaagttatggccaaggatctggaggttatggaagaggccaaggggctggtgcaggagcgggtgcgggtgctggagtaggaggatacggacaaggtgctggagctggtgctgcagcaggtgcagccacaagtgctggagcaggaggttatagccaaggagtaggaggttatggaagaggccaaggagctggtgctgcagcaggtgcagccgcaagtgctggagcaggaggttatggccaaggagctggaggctatggacaaggccaaggtgctgctgcagcaggtgcagccacaagtgctggagcaggaggttatggccaaggagctggaggctatggacaaggccaaggtgctggtgctgcagcaggtgcagctgcaagtgctggagcaggaagttatggccaaggagctggaggttatggaagaggccaaggggctggtgcaggagcgggtgcgggtgctggagcaggaggatacggacaaggtgctggagctggtgctgcagcaggtgcagccgcaagtgctggagcaggaggttatggccaaggagtaggaggttatggaagaggccaaggagctggtgcaggagcgggtgcggctgctggagcaggaggatacggacaaggtgctggagctggtgctgcagcaggtgcagccgcaagtgctggagcaggaggttatggccaaggagctggaggctatggacaaggccaaggtgctggtgctgcagcaggttcaatcgcaggtgctggagcaggaagttatggccaaggagctggaggttatggaagaggccaaggggctggtgcaggagcgggtgcaggtgctggaggatacggacaaggtgctggagctggtgctgcagcaggtgcagccgcaagtgctggagcaggaggttatggccaaggagctggaggctatggacaagaccaaggtgctggtgctgcagcaagttcagccgcaggtgctggagcaggaggttatggccttggagctggaggttatggaagaggccaaggagctggtgcaggagcgggtgcgggagctggagcaggaggatacggtcaaggtgctggagccggtgctgcggcaggtgcggctgcaagtgctggagcaggaggttatggccaaggagcaggaggctatggtcaaggaacaggtgctggagcaggaggatacggacaaggtactggagctggtgcagcagcaggtgcgggtgctggtgctggagcaagaggatatggccaacgagctggaggctatggacaaggacaaggtgcaggtgcagcagcaggtgcggctgcaggagcaggaagatatggccaagggtctggatcggcatccgtatcaactggtggatatggacaatcacaagttgcacgagcttcaagttcttcggctgttggaacatcttcatctgtctcaacatcaggctcaagtgggtattctcaagtcagtggaggctatggccaaagttctgcagttggtcaagcttctgcaggttatggacaaatgcaaagtggtgtagctgttagtggtggaagtgcatcagcgactatttcttctgcagcatcacgattaagttctcctccttcctcgtctagaataagctctgcagcgtcaagccttgcaactggtggagtgttgaattctgctgcattgccttcggtagtttctaatattatgtcccaagtttctgctagcagtcctggaatgtcatcaagtgaagttgttatccaagccctacttgaattggtgtcttctcttatacatattctcagctctgctaacatcggtcaagtcgacttcaactctgttggaaatacagctgctgtagttggtcaatcacttggggcagctttaggataaatagttataaatatttaaagctttactatccccactataataattattttaaagaaaatgtactatctttaaggaaataattagt

SEQ ID NO: 3 - protein, 1854 aa, Latrodectus hesperus
FVSLDAASVWDSTATAEAFIGSFNSGMERSGVLSRSQMDDISSISDTIISAIERNPNNSKSKLQALNMAFASSVSEIAFSENNGISNSAKIQAIIDALRGAFLQTIGTVDQTFLNEISSLVKMFSQVSAENAVSTSAGAAATSIGSSGGGYGQQSGGYIQGSAASASSSAGARTSAGTTGYSAGSTQVSSTVSSTSQAAQSATATSQYGQAQSAGSYSNAAAGATGAYAGGYGQGSSAATGAGAGGYGQGAGGYGQGAGSAAGAAAGAGVGGYGQGAGGYGQGAGAAAGAAAGAGAGGYGQGAGGYGQGAGAAAGAAAVAGAGGYGQGAGGYGQGAGAAAGAAAGAGSGGYGQGAGGYGQGAGAAAGAGGYGQGAGGYGQGAGAAAGAAAGAGAGGYGQGAGGYGQGAGAAAGAAAGAGAGGYGQGAGGYGQGAGAAAGAAAGAGAGGYGQGAGGYGQGAGAAAGAGAGGYGQGAGSAAGAGARGYGQGAGGYGQGAGSAAGAAAGAGAGGYGQGAGGYGQGAGAAAGAGAGGYGRGAGSAAGAGARGYGQGAGGYGQGAGSAAGAAAGSAAGAAAGSGAGGYGQGAGGYGQGAGAGAGGYGQGAGAATGAAAGAGAGGYGQGAGGYGQGSGAAAGAGGYGQGSQGYGQGAAATSSAAAGASSTGYTERQNEVVTTVTTTRQETADYAQKQAASAASAATSASAGAYGQSAGGYGRGAGAGARGYGQGAGAGAGGYGQGAGAGAGRYGQGAGAAAGAAAGAGAGGYGQGAGGYGRGQGAGAGAGAGGYGQGAGAGAAAGSAASAGAGGYGQGAGGYGRGQGAGAGAGAGAGAAAGAAASAGAGGYGQGAGGYGRGQGAGAGAGAGAGAAAGAAASAGAGGYGQGAGGYGQGQGAGAAAGAAAGAGAGGYGQGAGGYGQGKGAGAAAGAAAGAGAGGYGQGAGGYGRGQGAGAGAGVGAEAGGYGQGAGAGAAAGAAASAGAGGYGQGAGGYGRGQGAGAGAGAGAGAAAGAAASAVAGGYGQGAGGYGQGQGAGAAAGAAAGAGAGGYGQGAGGYGQGQGAGARAGAGAGAAAGAAASAGAGGYGQGAGGYGRGQGAGAGAGAGAGAVAGAAASAGAGVYGQGAGGYGRGQGAGAGAGAGAGGYGQGAGAGAAAGAGAGGYRQGAGADAAAGAGAGGYGRGQGAGAGAGAGAGAAAGAAASAGAGGYGQGAGGYGQGQGAGAAAGAAASAGAGSYGQGSGGYGRGQGAGAGAGAGAGVGGYGQGAGAGAAAGAATSAGAGGYSQGVGGYGRGQGAGAAAGAAASAGAGGYGQGAGGYGQGQGAAAAGAATSAGAGGYGQGAGGYGQGQGAGAAAGAAASAGAGSYGQGAGGYGRGQGAGAGAGAGAGAGGYGQGAGAGAAAGAAASAGAGGYGQGVGGYGRGQGAGAGAGAAAGAGGYGQGAGAGAAAGAAASAGAGGYGQGAGGYGQGQGAGAAAGSIAGAGAGSYGQGAGGYGRGQGAGAGAGAGAGGYGQGAGAGAAAGAAASAGAGGYGQGAGGYGQDQGAGAAASSAAGAGAGGYGLGAGGYGRGQGAGAGAGAGAGAGGYGQGAGAGAAAGAAASAGAGGYGQGAGGYGQGTGAGAGGYGQGTGAGAAAGAGAGAGARGYGQRAGGYGQGQGAGAAAGAAAGAGRYGQGSGSASVSTGGYGQSQVARASSSSAVGTSSSVSTSGSSGYSQVSGGYGQSSAVGQASAGYGQMQSGVAVSGGSASATISSAASRLSSPPSSSRISSAASSLATGGVLNSAALPSVVSNIMSQVSASSPGMSSSEVVIQALLELVSSLIHILSSANIGQVDFNSVGNTAAVVGQSLGAALG

SEQ ID NO: 4 - DNA, 6610 bp, Latrodectus hesperus
  CDS (1)..(6549)
atgcatattccagctcagttatctttactcttccttcttctgtgcgcccagagcttcgtctctttagatgccgccagtgtctgggacagcacagcaacagctgaagcttttattggaagcttcaattctggcatggaaagatgtggagtgttgtcacggtctcagatggatgatatctcatccattagcgacaccataatatctgccattgaaagaaacccaaacaactccaaatcgaaattgcaagctttaaacatggcttttgcatcatcagtttcggaaattgcgttctctgagaacaatggaatttcaaacagtgctaaaatacaagccattattgatgcactcagaggagcatttcttcaaactattggaacggtagatcaaacctttttgaatgaaatttctagtctcgttaaaatgttttcacaggtttcagcagaaaatgcagtttcaacaagtgctggagcagcagctacttccattggaagcagtggtggtggttacggacagcaaagtggtgggtacagtcaaggttcagctgcgtcagcctcatcttcagcaggagaaagaacctctgcaggcactactggatattctgctggttcaacacaagtctcttccactgtatcttctacaagccaagcagcgcaatcagcaaccgcaaccagtcaatatggccaagcacaaagtgccggatcatatagtaacgcggctgcaggagctacaggtgcttatgcaggaggatacggtcagggtagtagtgctgcagcaggtgctggagcaggaggatataaccagggcgcaggaagctatggacaaggtgctggtgctgcagcaagaacggctgctggtgcaggagcaggaggatatggtcaaggtgctggaggctacggacaaggtgctggtgctgcagctggtgcggctgctggagcaggagcaggaggatatggacgaggtgctggttctgcagcaggtgcggctgctggtgcaggagtaggagaatatggccaaggtgctggaggctacggacaaggtgctggtgctgcagcaggtgcagctgctggtgcaggagctggaggatatggtcaaggtgctggaggatacggacaaggtgctggaggatacggacaaggtgctggtgctgcagcaggtgcaggagccggaagttatggtcaaggtgctggaggctacggacaaggtgctggcgctgcagcaggagcagcagctggtgcaggagcaggaggatatggtcaaggtgctggaggctacggacaaggtgctggtgctgcagcaggtgcagctgctggtgcaggagccggaggatatggtcaaggtgctggaggatacggacaaggtgctggtgctgcagctggtgcaggagcaggaggatatggacgaggtgctggttctgcagcaggtgcggctgctggttcaggagcaggaggatatggacaaggagctggaggctatggacaaggagctggtgctggtgcaggaggatatggtcaaggtgctggtgcttcaacaggtgcagcagctggagcaggggcaggtggatatggccaaggtgctgggggctacggacaaggttctggtgctgcagctggagcaggaggatatggtcaaggatctcaaggctacgaacaaggtgctgctgcaacctcatcggctgcagcaggggcatcttcaactggttatacagaaagacaaaatgaagttgtcactacagttactactacacgtcaagaaatagcagatcgaagacaggcagcaagcgcctcaggtgcagtatcaacttcagctgcagctggctacggccaaggtgctggaacaggagctggaggatacggtcaaggcgctggtggctatggacaaagagctggtgctgcagcaggaggatacggtcaagggtctggtggctatggacaaggggttggtgctgcagctagtgtagctgctggaggagctggagcaggaggatacggtttaggtgctggtggctatggaagaggtgctggtgctgcagcaggaggatacggtcaaggcgctggtggctatggacaaggtgctggtgctgcagcgggagcaggagcaggaggatacgatcaaggcgctggtggctatggacaaggtgctggtgctgcagctagtgtagctgctggaggagctggatcaggaggatacggtctaggtgctggcattggagcaggtgcagctgcaatagctggaggatacggacaaggtgctggtgctgcagcaggtgcagctgctggtgcaggagccggaagttatggtcaaggtgctggaggctacggacaaggtgctggcgctgcagcaggagcagcagctggtgcaggagcaggaggatatggtcaaggtgctggaggctacggacaaggtgctggtgctgcagcaggtgcagctgctggtgcaggagccggaggatatggtcaaggtgctggaggctacggacaaggtgctggtgcaggagcaggaggatatggtcaaggtgctggaggctacggacaaggtgctggtgctgcagcaggtgcagctgctggtgcaggagccggaggatatggtcaaggtgctggaggatacggacaaggtgctggtgcaggagcaggaggatatggacgaggtgctggttctgcagcaggtgcggctgctggttcaggagcaggaggatatggacaaggagctggaggctatggacaaggagctggtgctggtgcaggaggatatggtcaaggtgctggtgcttcaacaggtgcagcagctggagcaggggcaggtggatatggccaaggtgctgggggctacggacaaggttctggtgctgcagctggagcaggaggatatggtcaaggatctcaaggctacggacaaggtgctgctgcaacctcatcggctgcagcaggggcatcttcaactggttatacagaaagacaaaatgaagttgtcactacagttactactacacgtcaagaaatagcagatcgaagacaggcagcaagcgcctcaggtgcagtatcaacttcagctgcagctggctacggccaaggtgctggaacaggagctggaggatacggtcaaggcgctggtggctatggacaaagagctggtgctgcagcaggaggatacggtcaagggtctggtggctatggacaaggggttggtactgcagctagtgtagctgctggaggagctggagcaggaggatacggtttaggtgctggtggctatggaagaggtgctggtgctgcagcaggatctggagcaggaggatacggtcaaggcgctggtggctatggacaaggtgctggtgctgcagcgggagctggagcaggaggatacggtcaaggcgctggtggctatggacaaggtgctggtgctgcagctagtgtagctgctggaggagctggagcaggaggatacggtttaggtgctggtggctatggaagaggtgctggtgctggagcaggtgcagctgccgggtctggagcaggaggatacagtcaaggcgctggtggctatggacaacgtggtggtgctgcagccggtgcagctgctggaggagctggatcaggaggatacggtctaggtgctggcattggagcaggtgcagctgcaatagctggaggatacggtcaaggagctggaggctacaaacaaggtgctggtgctgcagctggtgcaggtactggagcaggaggttatggtcaaggagcaggaggctatggacaaggggctggagctgcagcaggtgctagtgctggtgcaatagctggaggatacggtcaaggagctgtaggctacggtcaaggaactggaggctacggacaaggtgctgcagctggtgcaggtactggagcaggaggttatggtcagggagctggtggctatggacaagctactggagtaggaagctacggacaaggtactggtgacggtgctcgaggacctgcaggctatggacaaggtgcgggtgtcggtactataggagcagtaggttacggacaaggacaaacagctggagcatcctcttcaacagcagccggagcagcttctactggttatacagaaagacaaaatgaggttacaactactgtttctactacacgcaaagaaacagcagatcgaagacaagcagcaagtgcctcagctgcagtttccacttcagctgcagctggctatggcaaaggtactggaggctatgggcaaggtgctggcgcagcagcaggagctggagcgggaggatatgttcaaagttatggtgctgcagcaggtgcatcggctattgctggagcaggtagatatggacaaggtgcaggagcaacaggatacggtcaaggcgctggtggctatggaggaagtgctggtgctggagcaggggcaggtgcagcttcaggagctggagcaggtggatatggtcgaggcgctggtggctatggacaaggtgctggtgctgcaggtgcagctgcaggagctggaggatacgctcaagccgctggtggctatggacaaggttctgttgctgtagcaggtgcagctgcaggtgctggtggctatggacaaggtgctagtgctgcagcaggagctggaggatacggtcaagccgctggtgtctatggacaaggtgctggtgctgcaggtgcagctgcaggagctggtggctatggacaaggtgctggtgctgcagcaggtgccgctgcaggttctggtggctatggacaaggtgctggtgctgtagcaggtgcagctgcaggtgctggtggctatggacaaggtcctggcgctgcagcagatgcagcagcaggagctggtggctatggacaaggtaccggagggtatggacaaggtgctggtgctgcaggagctggagcaggtggatatggtcgaggcgctggtggctatggacaaggagctgatgctgcaggagctggagggtacggtggaggcgctggtggctatggacaaggtgccagaggctatggacaaggcgctggtgctgctgcaggttcgggttcaggagcaggaggatacggtcaaggtggtgttggaggatatggacaacgtgctggttcaggagcaacaggttatggccaaggtactggtggatacggtcaaggtgctggtgtatcatcggcagcagcaggagcatcctctactggctatgcaggaagacaaaatgaagttatcactacggttactactacacgccaagaaactgcagattatgctaataaacaagcagcaagttcctcatcagcagcagcttcagcggctagtggttatgctcaaggtgcttttgcaggaggctacggacgaggtctcggcgctggcgtcgaaggagattctgcaactggaacttatggtcaaggtggtggttctgccgcaggtgcatcagctagagctggagcaggagcttatggccaaggtaccggaggttatgcacaaagagctggtggagcagcaggtgctgctgctggcgctggagttggaggctatggagaaggagctggtgcagcagcaggtgcggctgctggtacttgggcaggagggtatggacaaggtgctggagttggtgctgccgcaggtgctggagctggaggttatggacaaggagctttatttggccaaggagctggaggctatggacaagcagcaggtgtggctgttggtggtggagcaggagggtatggacaaggcgctggagctggtgctgccgcaggtgcggctgcaagtactggagctggaggttatggacaaggagctgcagggtatggccaaggagctggagactacggacgaggagctggtgcagcagcaggtgtggctgctagagctggagcaggaacttatgtccaaggttcaggaggctatggtcaaggccaagcagctggtgctgcagccgctgcagcagcaggaggtggtggagcaggaagatatggacaaggggttggagtggcatccgtatcagctggtggatatggacaagcacaagtttcacgagcttcaagtacttcggctgctggaacttcaacctcgggttatacatctcagcaaacacaaactgcaggaacatcttcagcagtttcaacatcaggcacaagtggttattctcaagtaagtggaggctacgggcaaagtgcagcaggtggtcaagcttttgcaggttatggacaaatgcaaggtggcggagctgttagtggtacaagcgcatcagcgactgtttcatctgcagcatcacgattaagttctgcttcttcctcttccagaataagctctgcagcgtctagccttgcaactggtggagtgttgaatactgctgcattgccttcggtagtttctaatatgatgtcccaagtttcagctagcagtcctggaatgtcatcaagtgaagttgttatccaagccctacttgaattggtgtcttctcttatacatattctcagctccgctaacatcggtcaagttgacttcaattctgttggaaatacagctgctgttgttggtcaatcacttggggcagctttaggatgaatatttttaaatcttgaaagttgtattttcacttaatcttattaacttgattaactttagc

SEQ ID NO: 5 - protein, 2182 aa, Latrodectus hesperus
MHIPAQLSLLFLLLCAQSFVSLDAASVWDSTATAEAFIGSFNSGMERCGVLSRSQMDDISSISDTIISAIERNPNNSKSKLQALNMAFASSVSEIAFSENNGISNSAKIQAIIDALRGAFLQTIGTVDQTFLNEISSLVKMFSQVSAENAVSTSAGAAATSIGSSGGGYGQQSGGYSQGSAASASSSAGERTSAGTTGYSAGSTQVSSTVSSTSQAAQSATATSQYGQAQSAGSYSNAAAGATGAYAGGYGQGSSAAAGAGAGGYNQGAGSYGQGAGAAARTAAGAGAGGYGQGAGGYGQGAGAAAGAAAGAGAGGYGRGAGSAAGAAAGAGVGEYGQGAGGYGQGAGAAAGAAAGAGAGGYGQGAGGYGQGAGGYGQGAGAAAGAGAGSYGQGAGGYGQGAGAAAGAAAGAGAGGYGQGAGGYGQGAGAAAGAAAGAGAGGYGQGAGGYGQGAGAAAGAGAGGYGRGAGSAAGAAAGSGAGGYGQGAGGYGQGAGAGAGGYGQGAGASTGAAAGAGAGGYGQGAGGYGQGSGAAAGAGGYGQGSQGYEQGAAATSSAAAGASSTGYTERQNEVVTTVTTTRQEIADRRQAASASGAVSTSAAAGYGQGAGTGAGGYGQGAGGYGQRAGAAAGGYGQGSGGYGQGVGAAASVAAGGAGAGGYGLGAGGYGRGAGAAAGGYGQGAGGYGQGAGAAAGAGAGGYDQGAGGYGQGAGAAASVAAGGAGSGGYGLGAGIGAGAAAIAGGYGQGAGAAAGAAAGAGAGSYGQGAGGYGQGAGAAAGAAAGAGAGGYGQGAGGYGQGAGAAAGAAAGAGAGGYGQGAGGYGQGAGAGAGGYGQGAGGYGQGAGAAAGAAAGAGAGGYGQGAGGYGQGAGAGAGGYGRGAGSAAGAAAGSGAGGYGQGAGGYGQGAGAGAGGYGQGAGASTGAAAGAGAGGYGQGAGGYGQGSGAAAGAGGYGQGSQGYGQGAAATSSAAAGASSTGYTERQNEVVTTVTTTRQEIADRRQAASASGAVSTSAAAGYGQGAGTGAGGYGQGAGGYGQRAGAAAGGYGQGSGGYGQGVGTAASVAAGGAGAGGYGLGAGGYGRGAGAAAGSGAGGYGQGAGGYGQGAGAAAGAGAGGYGQGAGGYGQGAGAAASVAAGGAGAGGYGLGAGGYGRGAGAGAGAAAGSGAGGYSQGAGGYGQRGGAAAGAAAGGAGSGGYGLGAGIGAGAAAIAGGYGQGAGGYKQGAGAAAGAGTGAGGYGQGAGGYGQGAGAAAGASAGAIAGGYGQGAVGYGQGTGGYGQGAAAGAGTGAGGYGQGAGGYGQATGVGSYGQGTGDGARGPAGYGQGAGVGTIGAVGYGQGQTAGASSSTAAGAASTGYTERQNEVTTTVSTTRKETADRRQAASASAAVSTSAAAGYGKGTGGYGQGAGAAAGAGAGGYVQSYGAAAGASAIAGAGRYGQGAGATGYGQGAGGYGGSAGAGAGAGAASGAGAGGYGRGAGGYGQGAGAAGAAAGAGGYAQAAGGYGQGSVAVAGAAAGAGGYGQGASAAAGAGGYGQAAGVYGQGAGAAGAAAGAGGYGQGAGAAAGAAAGSGGYGQGAGAVAGAAAGAGGYGQGPGAAADAAAGAGGYGQGTGGYGQGAGAAGAGAGGYGRGAGGYGQGADAAGAGGYGGGAGGYGQGARGYGQGAGAAAGSGSGAGGYGQGGVGGYGQRAGSGATGYGQGTGGYGQGAGVSSAAAGASSTGYAGRQNEVITTVTTTRQETADYANKQAASSSSAAASAASGYAQGAFAGGYGRGLGAGVEGDSATGTYGQGGGSAAGASARAGAGAYGQGTGGYAQRAGGAAGAAAGAGVGGYGEGAGAAAGAAAGTWAGGYGQGAGVGAAAGAGAGGYGQGALFGQGAGGYGQAAGVAVGGGAGGYGQGAGAGAAAGAAASTGAGGYGQGAAGYGQGAGDYGRGAGAAAGVAARAGAGTYVQGSGGYGQGQAAGAAAAAAAGGGGAGRYGQGVGVASVSAGGYGQAQVSRASSTSAAGTSTSGYTSQQTQTAGTSSAVSTSGTSGYSQVSGGYGQSAAGGQAFAGYGQMQGGGAVSGTSASATVSSAASRLSSASSSSRISSAASSLATGGVLNTAALPSVVSNMMSQVSASSPGMSSSEVVIQALLELVSSLIHILSSANIGQVDFNSVGNTAAVVGQSLGAALG

SEQ ID NO: 6 - DNA, 19002 bp, Latrodectus hesperus
  CDS (1)..(19002)
atgaactggttaactagcctcagcttaatttttatattagcctttgtacaaaatgtacaagtcgaaggaagaaaaggacaccatcattccagtggctcatccaagagtccttgggcaaatccggctaaggcgaacgctttcatgaaatgtttgatccagaagataagcacatcccctgtctttcctcaacaagaaaaagaggacatggaagaaattgtggagaccatgatgtctgctttcagtagcatgagcacatctgggggaagcaatgcggcaaaactacaagccatgaatatggcatttgcttcatctatggcggaattagttattgccgaagatgctgataacccagacagtatatccattaaaacagaagctctggcaaagtctcttcaacagtgcttcaaatcaacattgggctcagtgaacaggcatttcattgcagagattaaagatctgattggaatgtttgccagagaagctgcagctatggaagaggccggtgatgaagaagaagagacatatccaagtgcttttgaaatccctgatcaatcgataagtgtcccatcagcagactttatatctggcatggatacattcataggttttggtggaacatctgcaagtggtgacgtatccgcaaaactctcaaaatcacttctgtcttcattggcatcttcaggtgtattcagagctgccttcaattcaagagtctctacaccagtagcagttcaactcaccgacgccttggtacaaaagatagcttccaatttgggattggattacgctactgcctcgaagcttagaaaggcaagtcaggccgtatcgaaagtccgaatgggatccgacacgaatgcatacgctctagctatttctagcgcactcgccgaagtattatcatcaagcggaaaggtagctgatgcgaacataaatcagatcgcaccacaacttgctagtggaatcgtactaggagtgtctaccaccgcgccgcaattcggagtcgacttgtcaagcatcaacgtgaatctggacatctcaaatgtagcaaggaatatgcaagcttccatacaaggcggtccagctccaataactgctgaaggacctgactttggtgctggataccctggcggcgcgcctacagatttgtctggtcttgatatgggtgctccttctgatggatctcgtggaggtgacgcgacagcgaaacttttgcaggctctcgtaccggcacttctcaagtcagatgtcttcagggcaatatacaagagaggtactcgtaaacaggtcgtgcagtatgtaacaaactcagcactgcaacaagctgcttcaagcttaggattagatgcgtcaacgatctcacaattgcaaactaaagcaactcaagctttgtcttccgtaagtgctgactctgactccactgcatatgcaaaagcatttggtttggctattgctcaagtcttaggaaccagcggacaggtgaatgacgcaaacgtcaaccaaatcggagcaaaacttgcaactggcattctgagaggatcatctgctgttgcacctcgacttggaatcgatctgtctggtattaatgtggactctgacataggaagcgtcacatcgttaatattatccggatccactctccagatgacaatacccgcgggaggagatgatttatcaggcggctatccaggcggattccctgctggcgctcaacctagcggtggtgcccctgtagacttcgcaggtggtgacgttgcagcaaaactcgcaagatcactcgcatctacactggcatcttcaggtgtattcagagctgccttcaattcaagagtctctacaccagtagcagttcaactcaccgacgccttggtacaaaagatagcttccaatttgggattggattacgctactgcctcgaagcttagaaaggcaagtcaggccgtatcgaaagtccgaatgggatccgacacgaatgcatacgctctagctatttctagcgcactcgccgaagtattatcatcaagcggaaaggtagctgatgcgaacataaatcagatcgcaccacaacttgctagtggaatcgtactaggagtgtctaccaccgcgccgcaattcggagtcgacttgtcaagcatcaacgtgaatctggacatctcaaaagtagcaaggaatatgcaagcttccatacaaggcggtccagctccaataactgctgaaggacctgactttggtgctggatatcctggcggtgcgcctacagatttgtctggtcttgatatgggtgctccttctgatggatctcgtggaggtgacgcgacagcgaaacttttgcaggctctcgtaccggcacttctcaagtcagatgtcttcagggcaatatacaagagaggtactcgtaaacaggtcgtgcagtatgtaacaaactcagcactgcaacaagctgcttcaagcttaggattagatgcgtcaacgatctcacaattgcaaactaaagcaactcaagctttgtcttccgtaagtgctgactctgactccactgcatatgcaaaagcatttggtttggctattgctcaagtcttaggaaccagcggacaggtgaatgacgcaaacgtcaaccaaatcggagcaaaacttgcaactggcattctgagaggatcatctgctgttgcacctcgacttggaatcgatctgtctggtattaatgtggactctgacataggaagcgtcacatcgttaatattatccggatccactctccagatgacaatacccgcgggaggagatgatttatcaggcggctatccaggcggattccctgctggcgctcaacctagcggtggtgcccctgtagacttcggaggtccttctgcaggtggtgacgttgcagcaaaactcgcaagatcactcgcatctacactggcatcttcaggtgtattcagagctgccttcaattcaagagtctctacaccagtagcagttcaattcaccgacgccttggtacaaaagatagcttccaatttgggattggattacgctactgcctcgaagcttagaaaggcaagtcaggccgtatcgaaagtccgaatgggatccgacacgaatgcatacgctctagctatttctagcgcactcgccgaagtattatcatcaagcggaaaggtagctgatgcgaacataaatcagatcgcaccacaacttgctagtggaatcgtactaggagtgtctaccaccgcgccgcaattcggagtcgacttgtcaagcatcaacgtgaatctggacatctcaaatgtagcaaggaatatgcaagcttccatacaaggcggtccagctccaataactgctgaaggacctgactttggtgctggataccctggcggcgcgcctacagatttgtctggtcttgatatgggtgctccttctgatggatctcgtggaggtgacgcgacagcgaaacttttgcaggctctcgtaccggcacttctcaagtcagatgtcttcagggcaatatacaagagaggtactcgtaaacaggtcgtgcagtatgtaacaaactcagcactgcaacaagctgcttcaagcttaggattagatgcgtcaacgatctcacaattgcaaactaaagcaactcaagctttgtcttccgtaagtgctgactctgactccactgcatatgcaaaagcatttggtttggctattgctcaagtcttaggaaccagcggacaggtgaatgacgcaaacgtcaaccaaatcggagcaaaacttgcaactggcattctgagaggatcatctgctgttgcacctcgacttggaatcgatctgtctggtattaatgtggactctgacataggaagcgtcacatcgttaatattatccggatccactctccagatgacaatacccgcgggaggagatgatttatcaggcggctatccaggcggattcccttctggcgctcaacctagcggtggtgcccctgtagacttcggaggtccttctgcaggtggtgacgttgcagcaaaactcgcaagatcactcgcatctacactggcatcttcaggtgtattcagagctgccttcaattcaagagtctctacaccagtagcagttcaactcaccgacgccttggtacaaaagatagcttccaatttgggattggattacgctactgcctcgaagcttagaaaggcaagtcaggccgtatcgaaagtccgaatgggatccgacacgaatgcatatgctctagctatttctagcgcactcgccgaagtattattatcaagcggaaaggtagctgatgcgaacataaatcagatcgcaccacaacttgctagtggaatcgtactaggagtgtctaccgccgcgccgcaattcggagtcgacttgtcaagcatcaacgtgaatctggacatctcaaatgtagcaaggaatatgcaagcttccatacaaggcggtccagctccaataactgctgaaggacctgactttggtgctggataccctggcggcgcgcctacagatttgtctggtcttgatatgggtgctccttctgatggatctcgtggaggtgacgcgacagcgaaacttttgcaggctctcgtaccggcacttctcaagtcagatgtcttcagggcaatatacaagagaggtactcgtaaacaggtcgtgcagtatgtaacaaactcagcactgcaacaagctgcttcaagcttaggattagatgcgtcaacgatctcacaattgcaaactaaagcaactcaagctttgtcttccgtaagtgctgactctgactccactgcatatgcaaaagcatttggtttggctattgctcaagtcttaggaaccagcggacaggtgaatgacgcaaacgtcaaccaaatcggagcaaaacttgcaactggcattctgagaggatcatctgctgttgcacctcgacttggaatcgatctgtctggtattaatgtggactctgacataggaagcgtcacatcgttaatattatccggatccactctccagatgacaatacccgcgggaggagatgatttatcaggcggctatccaggcggattccctgctggcgctcaacctagcggtggtgcccctgtagacttcggaggtccttctgcaggtggtgacgttgcagcaaaactcgcaagatcactcgcatctacactggcatcttcaggtgtattcagagctgccttcaattcaagagtctctacaccagtagcagttcaactcaccgacgccttggtacaaaagatagcttccaatttgggattggattacgctactgcctcgaagcttagaaaggcaagtcaggccgtatcgaaagtccgaatgggatccgacacgaatgcatacgctctagctatttctagcgcactcgccgaagtattatcatcaagcggaaaggtagctgatgcgaacataaatcagatcgcaccacaacttgctagtggaatcgtactaggagtgtctaccaccgcgccgcaattcggagtcgacttgtcaagcatcaacgtgaatctggacatctcaaatgtagcaaggaatatgcaagcttccatacaaggcggtccagctccaataactgctgaaggacctgactttggtgctggataccctggcggcgcgcctacagatttgtctggtcttgatatgggtgctccttctgatggatctcatggaggtgacgcgacagcgaaacttttgcaggctctcgtaccggcacttctcaagtcagatgtcttcagggcaatatacaagagaggtactcgtaaacaggtcgtgcagtatgtaacaaactcagcactgcaacaagctgcttcaagcttaggattagatgcgtcaacgatctcacaattgcaaactaaagcaactcaagctttgtcttccgtaagtgctgactctgactccactgcatatgcaaaagcatttggtttggctattgctcaagtcttaggaaccagcggacaggtgaatgacgcaaacgtcaaccaaatcggagcaaaacttgcaactggcattctgagaggatcatctgctgttgcacctcggcttggaatcgatctgtctggtattaatgtggactctgacataggaagcgtcacatcgttaatattatccggatccactctccagatgacaatacccgcgggaggagatgatttatcaggcggctatccaggcggattccctgctggcgctcaacctagcggtggtgcccctgtagacttcggaggtccttctgcaggtggtgacgttgcagcaaaactcgcaagatcactcgcatctacactggcatcttcaggtgtattcagagctgccttcaattcaagagtctctacaccagtagcagttcaactcaccgacgccttggtacaaaagatagcttccaatttgggattggattacgctactgcctcgaagcttagaaaggcaagtcaggccgtatcgaaagtccgaatgggatccgacacgaatgcatacgctctagctatttctagcgcactcgccgaagtattatcatcaagcggaaaggtagctgatgcgaacataaatcagatcgcaccacaacttgctagtggaatcgtactaggagtgtctaccaccgcgccgcaattcggagtcgacttgtcaagcatcaacgtgaatctggacatctcaaatgtagcaaggaatatgcaagcttccatacaaggcggtccagctccaataactgctgaaggacctgactttggtgctggataccctggcggcgcgcctacagatttgtctggtcttgatatgggtgctccttctgatggatctcgtggaggtgacgcgacagcgaaacttttgcaggctctcgtaccggcacttctcaagtcagatgtcttcagggcaatatacaagagaggtactcgtaaacaggtcgtgcagtatgtaacaaactcagcactgcaacaagctgcttcaagcttaggattagatgcgtcaacgatctcacaattgcaaactaaagcaactcaagctttgtcttccgtaagtgctgactctgactccactgcatatgcaaaagcatttggtttggctattgctcaagtcttaggaaccagcggacaggtgaatgacgcaaacgtcaaccaaatcggagcaaaacttgcaactggcattctgagaggatcatctgctgttgcacctcgacttggaatcgatctgtctggtattaatgtggactctgacataggaagcgtcacatcgttaatattatccggatccactctccagatgacaatacccgcgggaggagatgatttatcaggcggctatccaggcggattcccttctggcgctcaacctagcggtggtgcccctgtagacttcggaggtccttctgcaggtggtgacgttgcagcaaaactcgcaagatcactcgcatctacactggcatcttcaggtgtattcagagctgccttcaattcaagagtctctacaccagtagcagttcaactcaccgacgccttggtacaaaagatagcttccaatttgggattggattacgctactgcctcgaagcttagaaaggcaagtcaggccgtatcgaaagtccgaatgggatccgacacgaatgcatacgctctagctatttctagcgcactcgccgaagtattatcatcaagcggaaaggtagctgatgcgaacataaatcagatcgcaccacaacttgctagtggaatcgtactaggagtgtctaccaccgcgccgcaattcggagtcgacttgtcaagcatcaacgtgaatctggacatctcaaatgtagcaaggaatatgcaagcttccatacaaggcggtccagctccaataactgctgaaggacctgactttggtgctggataccctggcggcgcgcctacagatttgtctggtcttgatatgggtgctccttctgatggatctcgtggaggtgacgcgacagcgaaacttttgcaggctctcgtaccggcacttctcaagtcagatgtcttcagggcaatatacaagagaggtactcgtaaacaggtcgtgcagtatgtaacaaactcagcactgcaacaagctgcttcaagcttaggattagatgcgtcaacgatctcacaattgcaaactaaagcaactcaagctttgtcttccgtaagtgctgactctgactccactgcatatgcaaaagcatttggtttggctattgctcaagtcttaggaaccagcggacaggtgaatgacgcaaacgtcaaccaaatcggagcaaaacttgcaactggcattctgagaggatcatctgctgttgcacctcgacttggaatcgatctgtctggtattaatgtggactctgacataggaagcgtcacatcgttaatattatccggatccactctccagatgacaatacccgcgggaggagatgatttatcaggcggctatccaggcggattccctgctggcgctcaacctagcggtggtgcccctgtagacttcggaggtccttctgcaggtggtgacgttgcagcaaaactcgcaagatcactcgcatctacactggcatcttcaggtgtattcagagctgccttcaattcaagagtctctacaccagtagcagttcaactcaccgacgccttggtacaaaagatagcttccaatttgggattggattacgctactgcctcgaagcttagaaaggcaagtcaggccgtatcgaaagtccgaatgggatccgacacgaatgcatacgctctagctatttctagcgcactcgccgaagtattatcatcaagcggaaaggtagctgatgcgaacataaatcagatcgcaccacaacttgctagtggaatcgtactaggagtgtctaccaccgcgccgcaattcggagtcgacttgtcaagcatcaacgtgaatctggacatctcaaatgtagcaaggaatatgcaagcttccatacaaggcggtccagctccaataactgctgaaggacctgactttggtgctggatatcctggcggtgcgcctacagatttgtctggtcttgatatgggtgctccttctgatggatctcgtggaggtgacgcgacagcgaaacttttgcaggctctcgtaccggcacttctcaagtcagatgtcttcagggcaatatacaagagaggtactcgtaaacaggtcgtgcagtatgtaacaaactcagcactgcaacaagctgcttcaagcttaggattagatgcgtcaacgatctcacaattgcaaactaaagcaactcaagctttgtcttccgtaagtgctgactctgactccactgcatatgcaaaagcatttggtttggctattgctcaagtcttaggaaccagcggacaggtgaatgacgcaaacgtcaaccaaatcggagcaaaacttgcaactggcattctgagaggatcatctgctgttgcacctcgacttggaatcgatctgtctggtattaatgtggactctgacataggaagcgtcacatcgttaatattatccggatccactctccagatgacaatacccgcgggaggagatgatttatcaggcggctatccaggcggattccctgctggcgctcaacctagcggtggtgcccctgtagacttcggaggtccttctgcaggtggtgacgttgcagcaaaactcgcaagatcactcgcatctacactggcatcttcaggtgtattcagagctgccttcaattcaagagtctctacaccagtagcagttcaactcaccgacgccttggtacaaaagatagcttccaatttgggattggattacgctactgcctcgaagcttagaaaggcaagtcaggccgtatcgaaagtccgaatgggatccgacacgaatgcatacgctctagctatttctagcgcactcgccgaagtattatcatcaagcggaaaagtagctgatgcgaacataaatcagatcgcaccacaacttgctagtggaatcgtactaggagtgtctaccaccgcgccgcaattcggagtcgacttgtcaagcatcaacgtgaatctggacatctcaaatgtagcaaggaatatgcaagcttccatacaaggcggtccagctccaataactgctgaaggacctgactttggtgctggataccctggcggcgcgcctacagatttgtctggtcttgatatgggtgctccttctgatggatctcgtggaggtgacgcgactgcgaaacttttgcaggctctcgtaccggcacttctcaagtcagatgtcttcagggcaatatacaagagaggtactcgtaaacaggtcgtgcagtatgtaacaaactcagcactgcaacaagctgcttcaagcttaggattagatgcgtcaacgatctcacaattgcaaactaaagcaactcaagctttgtcttccgtaagtgctgactctgactccactgcatatgcaaaagcatttggtttggctattgctcaagtcttaggaaccagcggacaggtgaatgacgcaaacgtcaaccaaatcggagcaaaacttgcaactggcattctgagaggatcatctgctgttgcacctcgacttggaatcgatctgtctggtattaatgtggactctgacataggaagcgtcacatcgttaatattatccggatccactctccagatgacaatacccgcgggaggagatgatttatcaggcggctatccaggcggattccctgctggcgctcaacctagcggtggtgcccctgtagacttcggaggtccttctgcaggtggtgacgttgcagcaaaactcgcaagatcactcgcatctacactggcatcttcaggtgtattcagagctgccttcaattcaagagtctctacaccagtagcagttcaactcaccgacgccttggtacaaaagatagcttccaatttgggattggattacgctactgcctcgaagcttagaaaggcaagtcaggccgtatcgaaagtccgaatgggatccgacacgaatgcatacgctctagctatttctagcgcactcgccgaagtattatcatcaagcggaaaggtagctgatgcgaacataaatcagatcgcaccacaacttgctagtggaatcgtactaggagtgtctaccaccgcgccgcaattcggagtcgacttgtcaagcatcaacgtgaatctggacatctcaaatgtagcaaggaatatgcaagcttccatacaaggcggtccagctccaataactgctgaaggacctgactttggtgctggatatcctggcggtgcgcctacagatttgtctggtcttggatatgggtgctcctttctgatggatctcgtggaggtgacgcgacagcgaaacttttgcaggctctcgtaccggcacttctcaaagtcagatgtcttcagggcaatatacaagagaggtactcgtaaacaggtcgtgcagtatgtaacaaactcagcactgcaacaagctgcttcaagcttaggattagatgcgtcaacgatctcacaattgcaaactaaagcaactcaagctttgtcttccgtaagtgctgactctgactccactgcatatgcaaaagcatttggtttggctattgctcaagtcttaggaaccagcggacaggtgaatgacgcaaacgtcaaccaaatcggagcaaaacttgcaactggcattctgagaggatcatctgctgttgcacctcgacttggaatcgatctgtctggtattaatgtggactctgacataggaagcgtcacatcgttaatattatccggatccactctccagatgacaatacccgcgggaggagatgatttatcaggcggctatccaggcggattccctgctggcgctcaacctagcggtggtgcccctgtagacttcggaggtccttctgcaggtggtgacgttgcagcaaaactcgcaagatcactcgcatctacactggcatcttcaggtgtattcagagctgccttcaattcaagagtctctacaccagtagcagttcaactcaccgacgccttggtacaaaagatagcttccaatttgggattggattacgctactgcctcgaagcttagaaaggcaagtcaggccgtatcgaaagtccgaatgggatccgacacgaatgcatacgctctagctatttctagcgcactcgccgaagtattatcatcaagcggaaaggtagctgatgcgaacataaatcagatcgcaccacaacttgctagtggaatcgtactaggagtgtctaccaccgcgccgcaattcggagtcgacttgtcaagcatcaacgtgaatctggacatctcaaatgtagcaaggaatatgcaagcttccatacaaggcggtccagctccaataactgcagaaggacctgactttggtgctggataccctggcggcgcgcctgcagatttgtctggtcttgatatgggtgctccttctgatggatctcgtggaggtgacgcgacagcgaaacttttgcaggctctcgtaccggcacttctcaagtcagatgtcttcagggcaatatacaagagaggtactcgtaaacaggtcgtgcagtatgtaacaaactcagcactgcaacaagctgcttcaagcttaggattagatgcgtcaacgatctcacaattgcaaactaaagcaactcaagctttgtcttccgtaagtgctgactctgactccactgcatatgcaaaagcatttggtttggctattgctcaagtcttaggaaccagcggacaagtgaatgacgcaaacgtcaaccaaatcggagcaaaacttgcaactggcattctgagaggatcatctgctgttgcacctcgacttggaatcgatctgtctggtattaatgtggactctgacataggaagcgtcacatcgttaatattatccggatccactctccagatgacaatacccgcgggaggagatgatttatcaggcggctatccaggcggattccctgctggcgctcaacctagcggtggtgcccctgtagacttcggaggtccttctgcaggtggtgacgttgcagcaaaactcgcaagatcactcgcatctacactggcatcttcaggtgtattcagagctgccttcaattcaagagtctctacaccagtagcagttcaactcaccgacgccttggtacaaaagatagcttccaatttgggattggattacgctactgcctcgaagcttagaaaggcaagtcaggccgtatcgaaagtccgaatgggatccgacacgaatgcatacgctctagctatttctagcgcactcgccgaagtattatcatcaagcggaaaggtagctgatgcgaacataaatcagatcgcaccacaacttgctagtggaatcgtactaggagtgtctaccaccgcgccgcaattcggagtcgacttgtcaagcatcaacgtgaatctggacatctcaaatgtagcaaggaatatgcaagcttccatacaaggcggtccagctccaataactgcagaaggacctgactttggtgctggataccctggcggcgcgcctgcagatttgtctggtcttgatatgggtgctccttctgatggatctcgtggaggtgacgcgacagcgaaacttttgcaggctctcgtaccggcacttctcaagtcagatgtcttcagggcaatatacaagagaggtactcgtaaacaggtcgtgcagtatgtaacaaactcagcactgcaacaagctgcttcaagcttaggattagatgcgtcaacgatctcacaattgcaaactaaagcaactcaagctttgtcttccgtaagtgctgactctgactccactgcatatgcaaaagcatttggtttggctattgctcaagtcttaggaaccagcggacaggtgaatgacgcaaacgtcaaccaaatcggagcaaaacttgcaactggcattctgagaggatcatctgctgttgcacctcgacttggaatcgatctgtctggtattaatgtggactctgacataggaagcgtcacatcgttaatattatccggatccactctccagatgacaatacccgcgggaggagatgatttatcaggcggctatccaggcggattccctgctggcgctcaacctagcggtggtgcccctgtagacttcggaggtccttctgcaggtggtgacgttgcagcaaaactcgcaagatcactcgcatctacactggcatcttcaggtgtattcagagctgccttcaattcaagagtctctacaccagtagcagttcaactcaccgacgccttggtacaaaagatagcttccaatttgggattggattacgctactgcctcgaagcttagaaaggcaagtcaggccgtatcgaaagtccgaatgggatccgacacgaatgcatacgctctagctatttctagcgcactcgccgaagtattatcatcaagcggaaaggtagctgatgcgaacataaatcagatcgcaccacaacttgctagtggaatcgtactaggagtgtctaccaccgcgccgcaattcggagtcgacttgtcaagcatcaacgtgaatctggacatctcaaatgtagcaaggaatatgcaagcttccatacaaggcggtccagctccaataactgctgaaggacctgactttggtgctggataccctggcggcgcgcctacagatttgtctggtcttgatatgggtgctccttctgatggatctcgtggaggtgacgcgacagcgaaacttttgcaggctctcgtaccggcacttctcaagtcagatgtcttcagggcaatatacaagagaggtactcgtaaacaggtcgtgcagtatgtaacaaactcagcactgcaacaagctgcttcaagcttaggattagatgcgtcaacgatctcacaattgcaaactaaagcaactcaagctttgtcttccgtaagtgctgactctgactccactgcatatgcaaaagcatttggtttggctattgctcaagtcttaggaaccagcggacaggtgaatgacgcaaacgtcaaccaaatcggagcaaaacttgcaactggcattctgagaggatcatctgctgttgcacctcggcttggaatcgatctgtctggtattaatgtggactctgacataggaagcgtcacatcgttaatattatccggatccactctccagatgacaatacccgcgggaggagatgatttatcaggcggctatccaggcggattccctgctggcgctcaacctagcggtggtgcccctgtagacttcggaggtccttctgcaggtggtgacgttgcagcaaaactcgcaagatcactcgcatctacactggcatcttcaggtgtattcagagctgccttcaattcaagagtctctacaccagtagcagttcaactcaccgacgccttggtacaaaagatagcttccaatttgggattggattacgctactgcctcgaagcttagaaaggcaagtcaggccgtatcgaaagtccgaatgggatccgacacgaatgcatacgctctagctatttctagcgcactcgccgaagtattatcatcaagcggaaaggtagctgatgcgaacataaatcagatcgcaccacaacttgctagtggaatcgtactaggagtgtctaccaccgcgccgcaattcggagtcgacttgtcaagcatcaacgtgaatctggacatctcaaatgtagcaaggaatatgcaagcttccatacaaggcggtccagctccaataactgctgaaggacctgactttggtgctggataccctggcggcgcgcctacagatttgtctggtcttgatatgggtgctccttctgatggatctcgtggaggtgacgcgacagcgaaacttttgcaggctctcgtaccggcacttctcaagtcagatgtcttcagggcaatatacaagagaggtactcgtaaacaggtcgtgcagtatgtaacaaactcagcactgcaacaagctgcttcaagcttaggattagatgcgtcaacgatctcacaattgcaaactaaagcaactcaagctttgtcttccgtaagtgctgactctgactccactgcatatgcaaaagcatttggtttggctattgctcaagtcttaggaaccagcggacaggtgaatgacgcaaacgtcaaccaaatcggagcaaaacttgcaactggcattctgagaggatcatctgctgttgcacctcgacttggaatcgatctgtctggtattaatgtggactctgacataggaagcgtcacatcgttaatattatccggatccactctccagatgacaatacccgcgggaggagatgatttatcaggcagctatccaggcggattccctgctggcgctcaacccagcggtggtgcccctgtagacttcggaggtccttctgcaggtggtgacgttgcagcaaaactcgcaagatcactcgcatctacactggcatcttcaggtgtattcagagctgccttcaattcaagagtctctacaccagtagcagttcaactcaccgacgccttggtacaaaagatagcttccaatttgggattggattacgctactgcctcgaagcttagtaaggcaagtcaggccgtatcgaaagtccgaatgggatccgacacgaatgcatacgctctagctatttctagcgcactcgccgaagtattatcatcaagcggaaaggtagctgatgcgaacataaatcagatcgcaccacaacttgctagtggaatcgtactaggagtgtctaccaccgcgccgcaattcggagtcgacttgtcaagcatcaacgtgaatctggacatctcaaatgtagcaaggaatatgcaagcttccatacaaggcggtccagctccaataactgctgaaggacctgactttggtgctggataccctggcggcgcgcctacagatttgtctggtcttgatatgggtgctccttctgatggatctcgtggaggtgacgcgacagcgaaacttttgcaggctctcgtaccggcacttatcaagtcagatgtcttcagggcaatatacaagagaggtactcgtaaacaggtcgtgcagtatgtaacaaactcagcactgcaacaagctgcttcaagcttaggattagatgcgtcaacgatctcacaattgcaaactaaagcaactcaagctttgtcttccgtaagtgctgactctgactccactgcatatgcaaaagcatttggtttggctattgctcaagtcttaggaaccagcggacaggtgaatgacgcaaacgtcaaccaaatcggagcaaaacttgcaactggcattctgagaggatcatctgctgttgcacctcgacttggaatcgatctgtctggtattaatgtggactctgacataggaagcgtcacatcgttaatattatccggatccactctccagatgacaatacccgcgggaggagatgatttatcaggcgggtatccaggcggattccctgctggcgctcaacctagcggtggtgcccctgtagacttcggaggtccttctgcaggtggtgacgttgcagcaaaactcgcaagatcactcgcatctacactggcatcttcaggtgtattcagagctgccttcaattcaagagtctctacaccagtagcagttcaactcaccgacgccttggtacaaaagatagcttccaatttgggattggattacgctactgcctcgaagcttagaaaggcaagtcaggccgtatcgaaagtccgaatgggatccgacacgaatgcatacgctctagctatttctagcgcactcgccgaagtattatcatcaagcggaaaggtagctgatgcgaacataaatcagatcgcaccacaacttgctagtggaatcgtactaggagtgtctaccaccgcgccgcaattcggagtcgacttgtcaagcatcaacgtgaatctggacatctcaaatgtagcaaggaatatgcaagcttccatacaaggcggtccagctccaataactgctgaaggacctgactttggtgctggataccctggcggcgcgcctacagatttgtctggtcttgatatgggtgctccttctgatggatctcgtggaggtgacgcgacagcgaaacttttgcaggctctcgtaccggcacttctcaagtcagatgtcttcagggcaatatacaagagaggtactcgtaaacaggtcgtgcagtatgtaacaaactcagcactgcaacaagctgcttcaagcttaggattagatgcgtcaacgatctcacaattgcaaactaaagcaactcaagctttgtcttccgtaagtgctgactctgactccactgcatatgcaaaagcatttggtttggctattgctcaagtcttaggaaccagcggacaggtgaatgacgcaaacgtcaaccaaatcggagcaaaacttgcaactggcattctgagaggatcatctgctgttgcacctcgacttggaatcgatctgtctggtattaatgtggactctgacattggaagcgtctcatccttgatattatccggatccactctccaaatgactgcctcaggtaaagggtcgtatcctggaggtgaatcatcacaatttagtggattggatagtaatattggtttagttggcactcaggatgtcgcaataggtgtttcccagcctgttgatatctctttgaataatatactggattctcctcaaggtttaaaatctcctcaagcaagttccaggatcaaccgcctttcttcgtctgttgtaaacgcacttggacctaatggcttggacatcaataacttttctgatggtctgcgaactactctttctcagctttccagttcaggcttgtctaaaaaggaagcggctatcgaaaccctcatggaagcaatggttgctctgttacaagttctaaattcagcacaagtaaatcaagttgatacatcttctactgttgtaacaagtagttcacttgccaaagctttatcttctttgttttga

SEQ ID NO: 7 - protein, 6333 aa, Latrodectus hesperus
MNWLTSLSLIFILAFVQNVQVEGRKGHHHSSGSSKSPWANPAKANAFMKCLIQKISTSPVFPQQEKEDMEEIVETMMSAFSSMSTSGGSNAAKLQAMNMAFASSMAELVIAEDADNPDSISIKTEALAKSLQQCFKSTLGSVNRHFIAEIKDLIGMFAREAAAMEEAGDEEEETYPSAFEIPDQSISVPSADFISGMDTFIGFGGTSASGDVSAKLSKSLLSSLASSGVFRAAFNSRVSTPVAVQLTDALVQKIASNLGLDYATASKLRKASQAVSKVRMGSDTNAYALAISSALAEVLSSSGKVADANINQIAPQLASGIVLGVSTTAPQFGVDLSSINVNLDISNVARNMQASIQGGPAPITAEGPDFGAGYPGGAPTDLSGLDMGAPSDGSRGGDATAKLLQALVPALLKSDVFRAIYKRGTRKQVVQYVTNSALQQAASSLGLDASTISQLQTKATQALSSVSADSDSTAYAKAFGLAIAQVLGTSGQVNDANVNQIGAKLATGILRGSSAVAPRLGIDLSGINVDSDIGSVTSLILSGSTLQMTIPAGGDDLSGGYPGGFPAGAQPSGGAPVDFAGGDVAAKLARSLASTLASSGVFRAAFNSRVSTPVAVQLTDALVQKIASNLGLDYATASKLRKASQAVSKVRMGSDTNAYALAISSALAEVLSSSGKVADANINQIAPQLASGIVLGVSTTAPQFGVDLSSINVNLDISKVARNMQASIQGGPAPITAEGPDFGAGYPGGAPTDLSGLDMGAPSDGSRGGDATAKLLQALVPALLKSDVFRAIYKRGTRKQVVQYVTNSALQQAASSLGLDASTISQLQTKATQALSSVSADSDSTAYAKAFGLAIAQVLGTSGQVNDANVNQIGAKLATGILRGSSAVAPRLGIDLSGINVDSDIGSVTSLILSGSTLQMTIPAGGDDLSGGYPGGFPAGAQPSGGAPVDFGGPSAGGDVAAKLARSLASTLASSGVFRAAFNSRVSTPVAVQFTDALVQKIASNLGLDYATASKLRKASQAVSKVRMGSDTNAYALAISSALAEVLSSSGKVADANINQIAPQLASGIVLGVSTTAPQFGVDLSSINVNLDISNVARNMQASIQGGPAPITAEGPDFGAGYPGGAPTDLSGLDMGAPSDGSRGGDATAKLLQALVPALLKSDVFRAIYKRGTRKQVVQYVTNSALQQAASSLGLDASTISQLQTKATQALSSVSADSDSTAYAKAFGLAIAQVLGTSGQVNDANVNQIGAKLATGILRGSSAVAPRLGIDLSGINVDSDIGSVTSLILSGSTLQMTIPAGGDDLSGGYPGGFPSGAQPSGGAPVDFGGPSAGGDVAAKLARSLASTLASSGVFRAAFNSRVSTPVAVQLTDALVQKIASNLGLDYATASKLRKASQAVSKVRMGSDTNAYALAISSALAEVLLSSGKVADANINQIAPQLASGIVLGVSTAAPQFGVDLSSINVNLDISNVARNMQASIQGGPAPITAEGPDFGAGYPGGAPTDLSGLDMGAPSDGSRGGDATAKLLQALVPALLKSDVFRAIYKRGTRKQVVQYVTNSALQQAASSLGLDASTISQLQTKATQALSSVSADSDSTAYAKAFGLAIAQVLGTSGQVNDANVNQIGAKLATGILRGSSAVAPRLGIDLSGINVDSDIGSVTSLILSGSTLQMTIPAGGDDLSGGYPGGFPAGAQPSGGAPVDFGGPSAGGDVAAKLARSLASTLASSGVFRAAFNSRVSTPVAVQLTDALVQKIASNLGLDYATASKLRKASQAVSKVRMGSDTNAYALAISSALAEVLSSSGKVADANINQIAPQLASGIVLGVSTTAPQFGVDLSSINVNLDISNVARNMQASIQGGPAPITAEGPDFGAGYPGGAPTDLSGLDMGAPSDGSHGGDATAKLLQALVPALLKSDVFRAIYKRGTRKQVVQYVTNSALQQAASSLGLDASTISQLQTKATQALSSVSADSDSTAYAKAFGLAIAQVLGTSGQVNDANVNQIGAKLATGILRGSSAVAPRLGIDLSGINVDSDIGSVTSLILSGSTLQMTIPAGGDDLSGGYPGGFPAGAQPSGGAPVDFGGPSAGGDVAAKLARSLASTLASSGVFRAAFNSRVSTPVAVQLTDALVQKIASNLGLDYATASKLRKASQAVSKVRMGSDTNAYALAISSALAEVLSSSGKVADANINQIAPQLASGIVLGVSTTAPQFGVDLSSINVNLDISNVARNMQASIQGGPAPITAEGPDFGAGYPGGAPTDLSGLDMGAPSDGSRGGDATAKLLQALVPALLKSDVFRAIYKRGTRKQVVQYVTNSALQQAASSLGLDASTISQLQTKATQALSSVSADSDSTAYAKAFGLAIAQVLGTSGQVNDANVNQIGAKLATGILRGSSAVAPRLGIDLSGINVDSDIGSVTSLILSGSTLQMTIPAGGDDLSGGYPGGFPSGAQPSGGAPVDFGGPSAGGDVAAKLARSLASTLASSGVFRAAFNSRVSTPVAVQLTDALVQKIASNLGLDYATASKLRKASQAVSKVRMGSDTNAYALAISSALAEVLSSSGKVADANINQIAPQLASGIVLGVSTTAPQFGVDLSSINVNLDISNVARNMQASIQGGPAPITAEGPDFGAGYPGGAPTDLSGLDMGAPSDGSRGGDATAKLLQALVPALLKSDVFRAIYKRGTRKQVVQYVTNSALQQAASSLGLDASTISQLQTKATQALSSVSADSDSTAYAKAFGLAIAQVLGTSGQVNDANVNQIGAKLATGILRGSSAVAPRLGIDLSGINVDSDIGSVTSLILSGSTLQMTIPAGGDDLSGGYPGGFPAGAQPSGGAPVDFGGPSAGGDVAAKLARSLASTLASSGVFRAAFNSRVSTPVAVQLTDALVQKIASNLGLDYATASKLRKASQAVSKVRMGSDTNAYALAISSALAEVLSSSGKVADANINQIAPQLASGIVLGVSTTAPQFGVDLSSINVNLDISNVARNMQASIQGGPAPITAEGPDFGAGYPGGAPTDLSGLDMGAPSDGSRGGDATAKLLQALVPALLKSDVFRAIYKRGTRKQVVQYVTNSALQQAASSLGLDASTISQLQTKATQALSSVSADSDSTAYAKAFGLAIAQVLGTSGQVNDANVNQIGAKLATGILRGSSAVAPRLGIDLSGINVDSDIGSVTSLILSGSTLQMTIPAGGDDLSGGYPGGFPAGAQPSGGAPVDFGGPSAGGDVAAKLARSLASTLASSGVFRAAFNSRVSTPVAVQLTDALVQKIASNLGLDYATASKLRKASQAVSKVRMGSDTNAYALAISSALAEVLSSSGKVADANINQIAPQLASGIVLGVSTTAPQFGVDLSSINVNLDISNVARNMQASIQGGPAPITAEGPDFGAGYPGGAPTDLSGLDMGAPSDGSRGGDATAKLLQALVPALLKSDVFRAIYKRGTRKQVVQYVTNSALQQAASSLGLDASTISQLQTKATQALSSVSADSDSTAYAKAFGLAIAQVLGTSGQVNDANVNQIGAKLATGILRGSSAVAPRLGIDLSGINVDSDIGSVTSLILSGSTLQMTIPAGGDDLSGGYPGGFPAGAQPSGGAPVDFGGPSAGGDVAAKLARSLASTLASSGVFRAAFNSRVSTPVAVQLTDALVQKIASNLGLDYATASKLRKASQAVSKVRMGSDTNAYALAISSALAEVLSSSGKVADANINQIAPQLASGIVLGVSTTAPQFGVDLSSINVNLDISNVARNMQASIQGGPAPITAEGPDFGAGYPGGAPTDLSGLGYGCSFLMDLVEVTRQRNFCRLSYRHFSKSDVFRAIYKRGTRKQVVQYVTNSALQQAASSLGLDASTISQLQTKATQALSSVSADSDSTAYAKAFGLAIAQVLGTSGQVNDANVNQIGAKLATGILRGSSAVAPRLGIDLSGINVDSDIGSVTSLILSGSTLQMTIPAGGDDLSGGYPGGFPAGAQPSGGAPVDFGGPSAGGDVAAKLARSLASTLASSGVFRAAFNSRVSTPVAVQLTDALVQKIASNLGLDYATASKLRKASQAVSKVRMGSDTNAYALAISSALAEVLSSSGKVADANINQIAPQLASGIVLGVSTTAPQFGVDLSSINVNLDISNVARNMQASIQGGPAPITAEGPDFGAGYPGGAPADLSGLDMGAPSDGSRGGDATAKLLQALVPALLKSDVFRAIYKRGTRKQVVQYVTNSALQQAASSLGLDASTISQLQTKATQALSSVSADSDSTAYAKAFGLAIAQVLGTSGQVNDANVNQIGAKLATGILRGSSAVAPRLGIDLSGINVDSDIGSVTSLILSGSTLQMTIPAGGDDLSGGYPGGFPAGAQPSGGAPVDFGGPSAGGDVAAKLARSLASTLASSGVFRAAFNSRVSTPVAVQLTDALVQKIASNLGLDYATASKLRKASQAVSKVRMGSDTNAYALAISSALAEVLSSSGKVADANINQIAPQLASGIVLGVSTTAPQFGVDLSSINVNLDISNVARNMQASIQGGPAPITAEGPDFGAGYPGGAPADLSGLDMGAPSDGSRGGDATAKLLQALVPALLKSDVFRAIYKRGTRKQVVQYVTNSALQQAASSLGLDASTISQLQTKATQALSSVSADSDSTAYAKAFGLAIAQVLGTSGQVNDANVNQIGAKLATGILRGSSAVAPRLGIDLSGINVDSDIGSVTSLILSGSTLQMTIPAGGDDLSGGYPGGFPAGAQPSGGAPVDFGGPSAGGDVAAKLARSLASTLASSGVFRAAFNSRVSTPVAVQLTDALVQKIASNLGLDYATASKLRKASQAVSKVRMGSDTNAYALAISSALAEVLSSSGKVADANINQIAPQLASGIVLGVSTTAPQFGVDLSSINVNLDISNVARNMQASIQGGPAPITAEGPDFGAGYPGGAPTDLSGLDMGAPSDGSRGGDATAKLLQALVPALLKSDVFRAIYKRGTRKQVVQYVTNSALQQAASSLGLDASTISQLQTKATQALSSVSADSDSTAYAKAFGLAIAQVLGTSGQVNDANVNQIGAKLATGILRGSSAVAPRLGIDLSGINVDSDIGSVTSLILSGSTLQMTIPAGGDDLSGGYPGGFPAGAQPSGGAPVDFGGPSAGGDVAAKLARSLASTLASSGVFRAAFNSRVSTPVAVQLTDALVQKIASNLGLDYATASKLRKASQAVSKVRMGSDTNAYALAISSALAEVLSSSGKVADANINQIAPQLASGIVLGVSTTAPQFGVDLSSINVNLDISNVARNMQASIQGGPAPITAEGPDFGAGYPGGAPTDLSGLDMGAPSDGSRGGDATAKLLQALVPALLKSDVFRAIYKRGTRKQVVQYVTNSALQQAASSLGLDASTISQLQTKATQALSSVSADSDSTAYAKAFGLAIAQVLGTSGQVNDANVNQIGAKLATGILRGSSAVAPRLGIDLSGINVDSDIGSVTSLILSGSTLQMTIPAGGDDLSGSYPGGFPAGAQPSGGAPVDFGGPSAGGDVAAKLARSLASTLASSGVFRAAFNSRVSTPVAVQLTDALVQKIASNLGLDYATASKLSKASQAVSKVRMGSDTNAYALAISSALAEVLSSSGKVADANINQIAPQLASGIVLGVSTTAPQFGVDLSSINVNLDISNVARNMQASIQGGPAPITAEGPDFGAGYPGGAPTDLSGLDMGAPSDGSRGGDATAKLLQALVPALIKSDVFRAIYKRGTRKQVVQYVTNSALQQAASSLGLDASTISQLQTKATQALSSVSADSDSTAYAKAFGLAIAQVLGTSGQVNDANVNQIGAKLATGILRGSSAVAPRLGIDLSGINVDSDIGSVTSLILSGSTLQMTIPAGGDDLSGGYPGGFPAGAQPSGGAPVDFGGPSAGGDVAAKLARSLASTLASSGVFRAAFNSRVSTPVAVQLTDALVQKIASNLGLDYATASKLRKASQAVSKVRMGSDTNAYALAISSALAEVLSSSGKVADANINQIAPQLASGIVLGVSTTAPQFGVDLSSINVNLDISNVARNMQASIQGGPAPITAEGPDFGAGYPGGAPTDLSGLDMGAPSDGSRGGDATAKLLQALVPALLKSDVFRAIYKRGTRKQVVQYVTNSALQQAASSLGLDASTISQLQTKATQALSSVSADSDSTAYAKAFGLAIAQVLGTSGQVNDANVNQIGAKLATGILRGSSAVAPRLGIDLSGINVDSDIGSVSSLILSGSTLQMTASGKGSYPGGESSQFSGLDSNIGLVGTQDVAIGVSQPVDISLNNILDSPQGLKSPQASSRINRLSSSVVNALGPNGLDINNFSDGLRTTLSQLSSSGLSKKEAAIETLMEAMVALLQVLNSAQVNQVDTSSTVVTSSSLAKALSSLF

SEQ ID NO: 8 - DNA, 544 bp, Aliatypus coylei
  CDS (2)..(544)
cgcgcaggcctcagcatccgcatcagccgctggagctgcatctgccgcaggtgcagcatctgcatccggagcaggatctgcatccggaggagcatcaagcasctcgacaactataacgaccgaaagcacttcagcgtctgccgccgctgctgcttctgccgccgccgctgcatcttctgccgcagctgcttctgcagcatctgcatcatccgctagcgctacagcttcatcatttgcccgctctttctcatcaatcctgctggaatcagaatatttccactccwttttcggaagttcagtttcttcwtcttatgcagctgcagttgcgtcagctgcagcccgagctgctgcggaatcaagtggttacagaagacatgcatatgcattggcaaatgcagtcgctactgctgtagcaaaagtgacatcaggagccggtgttcatgcttacgctgaatcaatttcggccgcactgtctgatgcattactttactccggaacattgaactctgctaacgccaattctctcgcctactcatttgcttac

SEQ ID NO: 9 - protein, 181 aa, Aliatypus coylei
  misc_feature (34)..(34): The 'Xaa' at location 34 stands for Ser, or Thr.
  misc_feature (95)..(95): The 'Xaa' at location 95 stands for Ile, or Phe.
  misc_feature (102)..(102): The 'Xaa' at location 102 stands for Ser.
AQASASASAAGAASAAGAASASGAGSASGGASSXSTTITTESTSASAAAAASAAAAASSAAAASAASASSASATASSFARSFSSILLESEYFHSXFGSSVSXSYAAAVASAAARAAAESSGYRRHAYALANAVATAVAKVTSGAGVHAYAESISAALSDALLYSGTLNSANANSLAYSFAY

SEQ ID NO: 10 - DNA, 474 bp, Aliatypus plutonis
  CDS (2)..(472)
cgccagtggcgtcgctyaggcctcaacatccgcatcagcagctggagctgcatctgcgtcaggtgcagcatcggcatccggagcaggatctgcatccggagcagcatcaagcagctcgaccaccattacgaccgaaagcacatcagcgtctgccgctgctgctgcttcggccgccgccgctgcttctgctgccgcagctgcttctgctgaatctagatcatccgcaagcgctgcagcttcagcatttgcgcaatctttctcatcaatcctgctggaatcagaatatttctcttccattttcggaagttcaatttcttcatcttatgcagcggcaattgcgtcagctgcatcccgagctgctgcggaatcaagtggttacagaagagatgcatattcattggcaaatgcagtcgcctctgctgtagcaaaagtgacatcgggagcyggtgctcatgcatacgctgaagcaatttc

SEQ ID NO: 11 - protein, 157 aa, Aliatypus plutonis
  misc_feature (6)..(6): The 'Xaa' at location 6 stands for Gln.
ASGVAXASTSASAAGAASASGAASASGAGSASGAASSSSTTITTESTSASAAAAASAAAAASAAAAASAESRSSASAAASAFAQSFSSILLESEYFSSIFGSSISSSYAAAIASAASRAAAESSGYRRDAYSLANAVASAVAKVTSGAGAHAYAEAI

SEQ ID NO: 12 - DNA, 539 bp, Aliatypus torridus
  CDS (1)..(537)
tttgcttacgctttcgccagtggcgtcgctcaggcctcaacatccgcatcagcagctggagctgcatctgcgtcaggtgcagcatcggcatccggagcaggatctgcatccggagcagcatcaagccgctcgaccaccataacgaccgaaagcacatcagcatctgccgctgctgctgcttcggccgccgccgctgcttctgctgccgcagctgcttctgcrgaatctagatcatccgcaagcgctgcagcttcagcatttgcgcagtctttctcatcaatcctgctggaatcagaatatttctcttccattttcggaagttcaatttcttcatcttatgcagcggcaattgcgtcagctgcatcccgagctgctgcggaatcaagtggttacagaagagatgcatattcattggcaaatgcagtcgcctctgctgtagcaaaagtgacatcgggagccggtgctsatgcatacgctgaagcaatttcgggcgcactgtctcatgcattactttacaacggaacattgaactctgctaa

SEQ ID NO: 13 - protein, 179 aa, Aliatypus torridus
  misc_feature (156)..(156): The 'Xaa' at location 156 stands for Asp, or His.
FAYAFASGVAQASTSASAAGAASASGAASASGAGSASGAASSRSTTITTESTSASAAAAASAAAAASAAAAASAESRSSASAAASAFAQSFSSILLESEYFSSIFGSSISSSYAAAIASAASRAAAESSGYRRDAYSLANAVASAVAKVTSGAGAXAYAEAISGALSHALLYNGTLNSA

SEQ ID NO: 14 - DNA, 520 bp, Aliatypus thompsoni
  CDS (1)..(519)
tttgcttacgctttcgccagtgccgtcgcacaggcctcaacatccgcatcagcagctggagctgcatctgcaacaggtgcagcatcagcatccggagcaggatctgcaaccggtgcagcatcaagcagttcgaccaccataacgaccggcagcacttcagcgtctgccgccgccgctgcatcttctgccgcagctgcttctgcagaatctagatcatccgcaagcgctgcagcttcagcatttgctcaatctttctcatcaattttgctggaatcaaattatttcttctccattttcggargttcaatttcttcatcttatgcagcggcaattgcgtcagctgcatcccgagctgctgcggaatcaagtggttacagaakagatgcatattcattggcaaatgcagtcgcctctgctgtagcaaaagtgacatcgggagccggtgctgawgcttacgctgaagcaatttcgggcgcactctctcatgcattacttgtcaacggaacattgaactctgcta

SEQ ID NO: 15 - protein, 173 aa, Aliatypus thompsoni
  misc_feature (101)..(101): The 'Xaa' at location 101 stands for Gly, or Ser.
  misc_feature (127)..(127): The 'Xaa' at location 127 stands for Arg, or Ile.
  misc_feature (150)..(150): The 'Xaa' at location 150 stands for Glu, or Asp.
FAYAFASAVAQASTSASAAGAASATGAASASGAGSATGAASSSSTTITTGSTSASAAAAASSAAAASAESRSSASAAASAFAQSFSSILLESNYFFSIFGXSISSSYAAAIASAASRAAAESSGYRXDAYSLANAVASAVAKVTSGAGAXAYAEAISGALSHALLVNGTLNSA

SEQ ID NO: 16 - DNA, 516 bp, Aliatypus trophonius
  CDS (2)..(514)
tttcgccagtggcgtcgcacaggcctcaacatccgcatcagcagctggagctgcatctgcaacaggtgsagcatcagcgtccggagcaggatctgcatccggagcagcatcaagcagatcgaccaccataacgacagaaagcacttcagcgtctgccgctgctgcwkcttcggccgccgcckctgcttctgctgccgcagctgcttctgcagaatctagatcatccgcaagygctgcagcttcakcatttgcccagtctttctcatcaatcctgctggaatcagaatatttctcttccattttcggaagttcaatttcttcatcgtatgcagcggcawttgcgtcagctgcatcccgagctgctgcggaatcaagtggttaccgaagagatgcatattcattggcaaatgcagtcgcctctgctgtagcaaaagtgacatcgggagcaggtgctcatgcttacgctgaagcaatttcgggcgcactttctcatgcrttactttacaccggaacatt

SEQ ID NO: 17 - protein, 171 aa, Aliatypus trophonius
  misc_feature (23)..(23): The 'Xaa' at location 23 stands for Gly, or Ala.
  misc_feature (56)..(56): The 'Xaa' at location 56 stands for Ala, or Ser.
  misc_feature (61)..(61): The 'Xaa' at location 61 stands for Ala, or Ser.
  misc_feature (77)..(77): The 'Xaa' at location 77 stands for Ser.
  misc_feature (82)..(82): The 'Xaa' at location 82 stands for Ala, or Ser.
  misc_feature (113)..(113): The 'Xaa' at location 113 stands for Ile, or Phe.
FASGVAQASTSASAAGAASATGXASASGAGSASGAASSRSTTITTESTSASAAAAXSAAAXASAAAAASAESRSSAXAAASXFAQSFSSILLESEYFSSIFGSSISSSYAAAXASAASRAAAESSGYRRDAYSLANAVASAVAKVTSGAGAHAYAEAISGALSHALLYTGT

SEQ ID NO: 18 - DNA, 501 bp, Aliatypus erebus
  CDS (2)..(499)
tttcgccagtggcgtcgcacaggcctcaacatccgcatcagcagctggagctgcatctgcaacaggtgcagcatcagcgtccggagcaggatctgcatccggagcagcatcaagcagctcgaccaccataacgasaraaagcacttcagcgtctgccgmtgctgctgcttcggccgccgccgctgcttctgctgccgcagctgcytctgcagaatctagatcatccgcaagcgctgcagcttcagcatttgcccaatctttctcatcaatcctgctggaatcagaatatttctcttccattttcggaagttcaatttcttcatcttatgcagcggcaattgcgtcagctgcagcccgagctgctgcggaatcaagtggttaccgamgagatgcatattcattrgcaaatgcagtcgcctctgctgtagcaaaagtgacatcaggagcmggtgctcatgcttacgctgaagcaatttcgggcgcactgtctcattcgttact

SEQ ID NO: 19 - protein, 166 aa, Aliatypus erebus
  misc_feature (45)..(45): The 'Xaa' at location 45 stands for Arg, or Thr.
  misc_feature (46)..(46): The 'Xaa' at location 46 stands for Glu, or Lys.
  misc_feature (53)..(53): The 'Xaa' at location 53 stands for Asp, or Ala.
  misc_feature (129)..(129): The 'Xaa' at location 129 stands for Arg.
  misc_feature (134)..(134): The 'Xaa' at location 134 stands for Leu.
FASGVAQASTSASAAGAASATGAASASGAGSASGAASSSSTTITXXSTSASAXAAASAAAAASAAAAASAESRSSASAAASAFAQSFSSILLESEYFSSIFGSSISSSYAAAIASAAARAAAESSGYRXDAYSXANAVASAVAKVTSGAGAHAYAEAISGALSHSL

SEQ ID NO: 20 - DNA, 504 bp, Aliatypus isolatus
  CDS (2)..(502)
ttttgccagtggcgtcgcgcaggccgcaacatccgcatcagcagctggagctgcatctgcggcaggtgcagcatcagcatccgcagcaggatctgcatcaagcagctctaccaccataacgaccgaaagcacttcagcgtctgccgccgctgctgcttctgctgccgccgctgcttcttctgccgcatctgcttctgcagcatctagatcatccgcaagcgctacagcttcagcatttgcccaatccttctcttcaatcctgctggaatcagaatattttaactccrttttcggaagttcaatttcttcatcttatgcagcggcaattgcgtcagctgcatcccgagctgctgcggaatcaagtggttacagaagagatgcatattcattggcaaatgcagtcgcctcggctgtagcaaaagtgacatcgggagccgatgctcatgcttacgctgaagcaatttcgggcgcactgtctcatgcattactttacaccggaacatt

SEQ ID NO: 21 - protein, 167 aa, Aliatypus isolatus
  misc_feature (96)..(96): The 'Xaa' at location 96 stands for Val, or Ile.
FASGVAQAATSASAAGAASAAGAASASAAGSASSSSTTITTESTSASAAAAASAAAAASSAASASAASRSSASATASAFAQSFSSILLESEYFNSXFGSSISSSYAAAIASAASRAAAESSGYRRDAYSLANAVASAVAKVTSGADAHAYAEAISGALSHALLYTGT

SEQ ID NO: 22 - DNA, 481 bp, Aliatypus gnomus
  CDS (3)..(479)
ccgcaacatccgcatcagcakctgggactgcatctgcgrcaggtgaagcagcaggatctgcatcmggagcagcatcaatcagctccaccaccgtaacgaccaaaagcacatctgcttccgccgcagatgctgcttctgccgccgccgctgcttcttctgccgcatctgcttctgcagcatctagatcatccgcaagcgctgcagcttcagcatttgcccaatccttctactcaatcctgctggaatcaggatattttaactccattttcggaagttcaatttcttcatcttatgcagcggcaattgcgtcagctgcatcccgagctgctgcggaatcaagtggttacagaagagatgcatattcattggcaaatgcagtcgcctctgcygtagcaaaagtgacatcgggagccgatgcwcatgcttacgctgaagcaatttcgggcgcactgtctcatgcattacwttacaccggaacatt

SEQ ID NO: 23 - protein, 159 aa, Aliatypus gnomus
  misc_feature (7)..(7): The 'Xaa' at location 7 stands for Ala, or Ser.
  misc_feature (13)..(13): The 'Xaa' at location 13 stands for Ala, or Thr.
  misc_feature (21)..(21): The 'Xaa' at location 21 stands for Ser.
  misc_feature (155)..(155): The 'Xaa' at location 155 stands for His, or Leu.
ATSASAXGTASAXGEAAGSAXGAASISSTTVTTKSTSASAADAASAAAAASSAASASAASRSSASAAASAFAQSFYSILLESGYFNSIFGSSISSSYAAAIASAASRAAAESSGYRRDAYSLANAVASAVAKVTSGADAHAYAEAISGALSHALXYTGT

SEQ ID NO: 24 - DNA, 504 bp, Aliatypus californicus
  CDS (2)..(502)
tttcgccagtggcgtcgcgcaggccgcarcatccgcatcagcagctggagctgcatctgcracaggtgcagcagcaggatctgcatccggagcagcatcaagcrgctcyaccaccataacgaccraaagcacwtcwgcktcykccgcagytgctgcttctgccgccgccgcwgcttcttctgccgcatctgcttctgcagcatcyagwtcatccgcaagcgctgcagcttcagcatttgcccaatccttctcctcaatcctgctggaatcaggatattttaactccattttcggaagttcaatttcttcatcttctgcagcggcaattgcgtcagctgcatcccgagctgctgcggaatcaagtggttacagaagagatgcatattcattggcaaatgcagtcgcctctgctgtagcaaaagtgacatcgggagccgatgcttatgcttacgctgaagcaatttcgggcgcactctctcatgcattactttacaccggaacatt

SEQ ID NO: 25 - protein, 167 aa, Aliatypus californicus
  misc_feature (10)..(10): The 'Xaa' at location 10 stands for Ala, or Thr.
  misc_feature (35)..(35): The 'Xaa' at location 35 stands for Gly, or Ser.
  misc_feature (36)..(36): The 'Xaa' at location 36 stands for Ser.
  misc_feature (42)..(42): The 'Xaa' at location 42 stands for Glu, or Lys.
  misc_feature (44)..(44): The 'Xaa' at location 44 stands for Thr.
  misc_feature (45)..(45): The 'Xaa' at location 45 stands for Ser.
  misc_feature (47)..(47): The 'Xaa' at location 47 stands for Ser.
  misc_feature (48)..(48): The 'Xaa' at location 48 stands for Ala, or Ser.
  misc_feature (50)..(50): The 'Xaa' at location 50 stands for Ala, or Val.
  misc_feature (68)..(68): The 'Xaa' at location 68 stands for Ser.
  misc_feature (69)..(69): The 'Xaa' at location 69 stands for Arg, or Ser.
FASGVAQAAXSASAAGAASATGAAAGSASGAASSXXTTITTXSXXAXXAXAASAAAAASSAASASAAXXSSASAAASAFAQSFSSILLESGYFNSIFGSSISSSSAAAIASAASRAAAESSGYRRDAYSLANAVASAVAKVTSGADAYAYAEAISGALSHALLYTGT

SEQ ID NO: 26 - DNA, 498 bp, Aliatypus aquilonius
  CDS (2)..(496)
tttcgccagtggcgttgcgcaggcctcagcatccgcatcagcagatggagctgcctctgcaacaggtgcatcatcagcatccggagcaggatccgcagccggagcagcatcaagcagctcgaccaccataacgaccgaaagcacttcagcgtctgccgccgccgctgctgcttcttccgcaggtgcttctacagtatctagttcatctgcaagcgcttcagcttcagcatttgcccagtctttctcatcaatcctgctggaatctgattatttccactccattttccgaagttcaatttcttcatcttatgcagcggcaattgcgtcagctgcatcccgatctgctgcggaatcaagtggttacagaagtgatacatattcattggcaaatgcagtcgcctctgctgtagcaaaagtgacatcaggagcagatgctcatgcttacgctgaagcaatttcgggcgcactgtctcgtgcattactttacaccggaacatt

SEQ ID NO: 27 - protein, 165 aa, Aliatypus aquilonius
FASGVAQASASASADGAASATGASSASGAGSAAGAASSSSTTITTESTSASAAAAAASSAGASTVSSSSASASASAFAQSFSSILLESDYFHSIFRSSISSSYAAAIASAASRSAAESSGYRSDTYSLANAVASAVAKVTSGADAHAYAEAISGALSRALLYTGT

SEQ ID NO: 28 - DNA, 516 bp, Aliatypus janus
  CDS (2)..(514)
tttcgccagtggcgtcgcgcaggccgcaagatccgcatcagcagctggagctgcatctgcggcaggtgcagcatcagcatccgcagcaggagctgcatccggagcagcatcaagcagcactaaaaccataacgaccgaaagcacttcagcgtctgccgccgctgctgcttctgccgccgccgctgcttcttctgccgcatctgcttctgcagcatctagatcatccgcaagcgctgcagcttcagcatttgcacagtctttctcctcaatcctgctggaatcagaatattttaactctattttcggaagttcaatttcttcatcttatgcagcggcaattgcgtcagctgcatcccgagctgctgcggaatcaagtggttacagaagagatgcatattcattggcaaatgcagtcgcctctgctgtagcaaaagtgacatcgggagccgatgcttatgcttacgctgaagcaatttcgggcgcactgtctcgtgcattaatttacaccggatcatt

SEQ ID NO: 29 - protein, 171 aa, Aliatypus janus
FASGVAQAARSASAAGAASAAGAASASAAGAASGAASSSTKTITTESTSASAAAAASAAAAASSAASASAASRSSASAAASAFAQSFSSILLESEYFNSIFGSSISSSYAAAIASAASRAAAESSGYRRDAYSLANAVASAVAKVTSGADAYAYAEAISGALSRALIYTGS

SEQ ID NO: 30 - DNA, 669 bp, Aliatypus coylei
  CDS (1)..(669)
gcaatcgcgcaggcctcagcatccgcatcagccgctggagctgcatctgccacaggtgcagcatctgcatccggtgcaggatctgcatccggaggagcatcaagcagctcgaccacaataaccaccaaaattacatcaggttccgccgccgaagctgcttctgccgccgcttctactgccgccgccaccgatttgtccgcttctgtgtcacatactcaatcatcgtcgagttctggacaatacgatattgtaggtgatgaccttggtttggggtacatttctggtgaggttcttccacttaacactcgagctttgaattttccttctgatttgggttcgttaacttctggcttgctctcctctctggatgggcgtattttacctgctgttgactatagaataacttctttgacttcatcattactttctttactttccactagcgaaggtggctttaattattcgtctttcgcgaagaacttggctattttggcaaatcaaatcagtggtagcaatcctgggctgtctgtatctcaagtcgtttcggaaactctgctcgaaactgtcggtgcattaatccatattttagtgtcttcccgggttggatctgtcagtattgatgattcgagttcagctgctagagcatttgctgattcctttgctcaagca

SEQ ID NO: 31 - protein, 223 aa, Aliatypus coylei
AIAQASASASAAGAASATGAASASGAGSASGGASSSSTTITTKITSGSAAEAASAAASTAAATDLSASVSHTQSSSSSGQYDIVGDDLGLGYISGEVLPLNTRALNFPSDLGSLTSGLLSSLDGRILPAVDYRITSLTSSLLSLLSTSEGGFNYSSFAKNLAILANQISGSNPGLSVSQVVSETLLETVGALIHILVSSRVGSVSIDDSSSAARAFADSFAQA

SEQ ID NO: 32 - DNA, 552 bp, Aliatypus thompsoni
  CDS (1)..(552)
gtgacatcgggagccggtgctgctgcttacgctgatgcaatttcgggcgcactctctcatgcattacttgtcaacggaacattgaactctgctaacgccaattctcttgcctacgcctttgcttacgctttcgccagtgccgtcgcacaggcctcaacatccgcatcagcagctggagctgcatcttcaaatatcgtaggtgatgaccttggtttgggacacatatctggtggaattcttccagttaacacccctgctttgaatttttcttctggtttgggttcgttaacgtctggcttgctctcctctctggatgggcctgttttatcatcggttgactatagaataacttctttgacttcatcagtactttctttactttccactagtggaggtccctttaattattcgtctttcgcgaagaacttggctattttggcatatcaaatcagtgttagcaatcctgggctgtctgtatctcaagtgattttggaaactctgctcgaatctgtcggtgcattgatccatattttagtgtcgtcaccagttgga

SEQ ID NO: 33 - protein, 184 aa, Aliatypus thompsoni
VTSGAGAAAYADAISGALSHALLVNGTLNSANANSLAYAFAYAFASAVAQASTSASAAGAASSNIVGDDLGLGHISGGILPVNTPALNFSSGLGSLTSGLLSSLDGPVLSSVDYRITSLTSSVLSLLSTSGGPFNYSSFAKNLAILAYQISVSNPGLSVSQVILETLLESVGALIHILVSSPVG

SEQ ID NO: 34 - DNA, 735 bp, Aliatypus trophonius
  CDS (1)..(735)
gtgacatcgggagccggtgcacgtgcttacgctgaagcaatttcgggcgcactgtctcatgcgttactttacaccggaacattgaactctgctaacgccaattctcttgcgtatgcctttgcttacgctttcgtccatgtcgccgcgccgtccgcagcttcaactgcatctggagcatcatcttcaatcggagatgcgtcttcaaacggtgtagcatggagcagtacgaccgctggagaaacgagaagttccgcagcaacctcggtcagctcgacttctacgaaatcaagcagttccgcttctgaagccgccgccaccgatttgtctggtcctaggacacatactcaatcatcgtcgaattctggacaatacaatattgtaggtgatgatcttgctttgggatacatttctggtgggattcttccagttaacactcctgctttgagttttccttctgatttgggttcgttaacgtctggcttgctttcctctctggatgggcctgttttaccttctgttgaccgtagaataacttctttgacttcatcaatactttctttactttccactagtggaggtgcctttaattattcgtctttcgcgaagtacttgtctattttatcatatcaaatcagtgttagcaatcctgggctgtctgtatctcaagtgatttcggaaactctgctcgaatctgtcggtgcattaatccatattttagtgtcttcacgagttgga

SEQ ID NO: 35 - protein, 245 aa, Aliatypus trophonius
VTSGAGARAYAEAISGALSHALLYTGTLNSANANSLAYAFAYAFVHVAAPSAASTASGASSSIGDASSNGVAWSSTTAGETRSSAATSVSSTSTKSSSSASEAAATDLSGPRTHTQSSSNSGQYNIVGDDLALGYISGGILPVNTPALSFPSDLGSLTSGLLSSLDGPVLPSVDRRITSLTSSILSLLSTSGGAFNYSSFAKYLSILSYQISVSNPGLSVSQVISETLLESVGALIHILVSSRVG

SEQ ID NO: 36 - DNA, 732 bp, Aliatypus erebus
  CDS (1)..(732)
acatcgggagcaggtgctcatgcttacgctgaagcaatttcgggcgcactttctcatgcrttactctacaccggaacattgaactctgctaacgccaattctcttgcgtatgcctttgcttacgctttcgtcaatgtcgccgcgcagtccgcagcttcaactgtatctggagcatcatcttcaatcggagatgcgtcttcaaacggagtagcttcgagcagcacaaccgctagagaaacgggaagttccgcagcaaactcggtcagctcgacttctacgaaatcaagcagttccgcttctrmwgccgccgccaccgatttgtcwggtyctaggwcayatactcaatcatcgtcgaattctggacaatacaatattgtagrtgatkatcttgctttgggatacatwtctggtgggattcttccagttaacactcctgctttgggttttccttctgatttgcgttcgttaacgtctggcttgctctcctctctggatgggcctcttttaccttctgttgaccatagaataacttctttgacttcatcaatactttctttactttccactagtggaggtgcctttaattattcgtctttcgcgaagtacttgtctattttatcatatcaaatcagtgttagcaatcctgggctgtctgtatctcaagtgatttcggaaactctgctcgaatctgtcggtgcattaatccatattttagtgtcttcacgagttgga

SEQ ID NO: 37 - protein, 244 aa, Aliatypus erebus
  misc_feature (101)..(101): The 'Xaa' at location 101 stands for Glu, Asp, Ala, Lys, Asn, or Thr.
  misc_feature (108)..(108): The 'Xaa' at location 108 stands for Ser.
  misc_feature (110)..(110): The 'Xaa' at location 110 stands for Pro, or Ser.
  misc_feature (112)..(112): The 'Xaa' at location 112 stands for Thr, or Ser.
  misc_feature (113)..(113): The 'Xaa' at location 113 stands for His, or Tyr.
  misc_feature (127)..(127): The 'Xaa' at location 127 stands for Gly, or Asp.
  misc_feature (129)..(129): The 'Xaa' at location 129 stands for Asp, or Tyr.
  misc_feature (135)..(135): The 'Xaa' at location 135 stands for Ile.
TSGAGAHAYAEAISGALSHALLYTGTLNSANANSLAYAFAYAFVNVAAQSAASTVSGASSSIGDASSNGVASSSTTARETGSSAANSVSSTSTKSSSSASXAAATDLXGXRXXTQSSSNSGQYNIVXDXLALGYXSGGILPVNTPALGFPSDLRSLTSGLLSSLDGPLLPSVDHRITSLTSSILSLLSTSGGAFNYSSFAKYLSILSYQISVSNPGLSVSQVISETLLESVGALIHILVSSRVG

SEQ ID NO: 38 - DNA, 651 bp, Aliatypus plutonis
  CDS (1)..(651)
gtggaaagagtgacatcgggagccggtgctcatgcatacgctgaagcaatttcgggcgcagtgtctcgtgcattactttacaccggaacattgaactctgctaacgccgattctcttgcgtatgcttttgcttacgcttttgtcaatgtcgccgcgcagtccgcatcttcaactgcatctggagcattatcttcaaacggagtagcatcgagcagcgcgaccgctagggccaccgatttgtttggttctaggtcacatactcaatcatcgtcgaattctggacaatacaatattgtaggtgatgatctttctttgggatacctttctggtgggattcttccaggtaacactcctgctttgagttttccttctgatttgggttcgttaacgtctggcttgctctcctctctggatgggcctgttttaccttctgttgaccatagaataacttctttgacttcatcaatactttctttactttctactagtggaggtgccyttaattattcgtctttcgcgaagaacttggctattttggcatatcaaatcagtgttagcaatcctgggctgtctgtatctcaagtgatttcggaaactctgctcgaatctgtcactgcattaatccatattttagtgtcttcacgagttgga

SEQ ID NO: 39 - protein, 217 aa, Aliatypus plutonis
  misc_feature (167)..(167): The 'Xaa' at location 167 stands for Leu, or Phe.
VERVTSGAGAHAYAEAISGAVSRALLYTGTLNSANADSLAYAFAYAFVNVAAQSASSTASGALSSNGVASSSATARATDLFGSRSHTQSSSNSGQYNIVGDDLSLGYLSGGILPGNTPALSFPSDLGSLTSGLLSSLDGPVLPSVDHRITSLTSSILSLLSTSGGAXNYSSFAKNLAILAYQISVSNPGLSVSQVISETLLESVTALIHILVSSRVG

SEQ ID NO: 40 - DNA, 642 bp, Aliatypus torridus
  CDS (1)..(642)
gtgacatcgggagccggtgctgatgcatacgctgaagcaatttcgggcgcactgtctcatgcattactttacaacggaacattgaactctgctaacgccaattctcttgcctacgcctttgcttacgctttcgccagtggcgtcgctcaggcctcatcttcaactgcatctggagcattatcttcaaacggagtaacatcgagcagcacgaccgctagagccaccgatttgtttggttctaggtcatatactcaatcatcgtcgaattctggacaatacaatattgtaggtgatgatcttgctttgggatacctttctggtgggattcttccagttaacactcctgctttgagttttccatctgatttgggttcgttaacgtctggcttgctctcctctctggatggacctgttttaccttctgttgaccatagaataacttctttgacttcatcaatactttctttactttccactagtggaggtgcctttaattattcgtctttcgcgaagaacttggctattttggcatatcaaatcagtgttagcaatcctgggctgtctgtatctcaagtgatttcggaaactctgctcgaatctgtcagtgcattaatccatattttagtgtcttcgcgagttgga

SEQ ID NO: 41 - protein, 214 aa, Aliatypus torridus
VTSGAGADAYAEAISGALSHALLYNGTLNSANANSLAYAFAYAFASGVAQASSSTASGALSSNGVTSSSTTARATDLFGSRSYTQSSSNSGQYNIVGDDLALGYLSGGILPVNTPALSFPSDLGSLTSGLLSSLDGPVLPSVDHRITSLTSSILSLLSTSGGAFNYSSFAKNLAILAYQISVSNPGLSVSQVISETLLESVSALIHILVSSRVG

SEQ ID NO: 42 - DNA, 777 bp, Aliatypus californicus
  CDS (1)..(777)
gcatattcattggcaaattcagtcgcatctgttgtagcaaaagtgtcatcgggagccgatgctcatgcttacgctgaagcaatttcgggcgcactgtctcgtgcattactttacaccggaacattgaactctgctaacgccagttctcttgcctacgcctttgcttacgctttcgtcaatgtcgccgtgcaggccgcagcttcatcagcatctggagcatcatcttcaatcggagtagcatcttcaaacggagtagcatcgagcagcacgaccgctacaaaaacgagaatttccgcaggatcctcgggcagctcgacttcttcgaaatcaagcagttcagcttctactgccgcccccaccgatttgtctggttccaggttacatgctctatcatcgtcgaaatctggacaagacaatattgtaggtgatgactttggtttggaatacatttctggtgggaatcttccagttaacactcctgctttgaattttccttctgatttgggttcggtaacgtctggcttgctctcctctctagatgggcctgttttaccttctgttgagtatagaataacttctttgacttcatcagtactttctttgctttccactagtggaggtgcctttaattattcgtccttcgcgaagaacttggctattttggcatatcaaatcagtgttagcaatcctgggctgtctgtatctcaagtggtttcggaaactctgctcgaatctgtcggtgcattaatccatattttagtgtcttcacaggttgga

SEQ ID NO: 43 - protein, 259 aa, Aliatypus californicus
AYSLANSVASVVAKVSSGADAHAYAEAISGALSRALLYTGTLNSANASSLAYAFAYAFVNVAVQAAASSASGASSSIGVASSNGVASSSTTATKTRISAGSSGSSTSSKSSSSASTAAPTDLSGSRLHALSSSKSGQDNIVGDDFGLEYISGGNLPVNTPALNFPSDLGSVTSGLLSSLDGPVLPSVEYRITSLTSSVLSLLSTSGGAFNYSSFAKNLAILAYQISVSNPGLSVSQVVSETLLESVGALIHILVSSQVG

SEQ ID NO: 44 - DNA, 759 bp, Aliatypus janus
  CDS (3)..(758)
ccgatgctcatgcttacgctgaagcaatttcgggcgcactgtctcatgcattactttacaccggaacattgaactctgctaacgccaattctcttgcctacgcctttgcttacgctttcgtcaatgtcaccgcgcattccgctgcttcatcagcatctggtgcgtcatcttcaatcggtgtagcatcttcaaaaggagtagcatcgagcagcaagaccgctacaaaagcgagaatttccgcaggatcctcgggcagctcgacttctacgaaatcaagcagttcagcttctactgccgtccccactaatttgtctggttccaggtcacatgctctatcatcgtcgaattctggacaagacaatactgtaggtgatgactttggtttgggatacatttctggtgggattcttccagttaacactcctgctttgaattttccttctgatttgggttcgttaacgtctggcttgctctcctctctagatgggcctgttttaccttctgttgagtacagaataacttctttgacttcatcagtactttctttactttccactagtggaggtgcctttaattattcgtccttcgcgaagaacttagctattttggcatatcaaatcagtgttagcaatcctgggctgtctgtatctcaagtggtttcggaaactctgctcgaatctgtcggtgcattaatccatattttagtgtcttcacaggttggatctgtaagtactgctgattcgagttcagctgctagag

SEQ ID NO: 45 - protein, 252 aa, Aliatypus janus
DAHAYAEAISGALSHALLYTGTLNSANANSLAYAFAYAFVNVTAHSAASSASGASSSIGVASSKGVASSSKTATKARISAGSSGSSTSTKSSSSASTAVPTNLSGSRSHALSSSNSGQDNTVGDDFGLGYISGGILPVNTPALNFPSDLGSLTSGLLSSLDGPVLPSVEYRITSLTSSVLSLLSTSGGAFNYSSFAKNLAILAYQISVSNPGLSVSQVVSETLLESVGALIHILVSSQVGSVSTADSSSAAR

SEQ ID NO: 46 - DNA, 678 bp, Aliatypus isolatus
  CDS (1)..(678)
catgcattactttacaccggaacattgaactctgctaacgccaattctcttgcctacgcctttgcttacrckttcgycaatgtcgccgcgcatgcagcatcykcatcagcatctggagcatcatcttcaatcggagtagcatcttcaaacggagtagcatcgagcagcacgactgctacaaaaacgagaatttccgcaggatcctykggcagctcgacttctrcgaaatcaagcagttcagcttctactgccgcctccaccgatttgtctggttccaggtcacatgctctatcatcgtcgagttctggacaagacaatattgtaggtgatgactttggtttgggatacatttctggtgggattcttccagttaacactgctgctttgaattttccttctgatttgggttcgttawcgtctggcttgctctcctctctagatgggcctgttttaccttctgttgagtatagaataacttctttgacttcatcagtactttctttactttccactagtggaggtgcctttaattattcgtccttcgcgaagaacttggctattttggcatatcaaatcagtgttagcaatcctgrgctgtctgtatctcaagtggtttcggaaactctgctcgaatctgtcggtgcattaatccatattttagtgtcttcacaggttgga

SEQ ID NO: 47 - protein, 226 aa, Aliatypus isolatus
  misc_feature (24)..(24): The 'Xaa' at location 24 stands for Ala, or Thr.
  misc_feature (26)..(26): The 'Xaa' at location 26 stands for Ala, or Val.
  misc_feature (34)..(34): The 'Xaa' at location 34 stands for Ser.
  misc_feature (35)..(35): The 'Xaa' at location 35 stands for Ala, or Ser.
  misc_feature (69)..(69): The 'Xaa' at location 69 stands for Ser, Leu, or Phe.
  misc_feature (75)..(75): The 'Xaa' at location 75 stands for Ala, or Thr.
  misc_feature (139)..(139): The 'Xaa' at location 139 stands for Thr, or Ser.
  misc_feature (198)..(198): The 'Xaa' at location 198 stands for Gly, or Glu.
HALLYTGTLNSANANSLAYAFAYXFXNVAAHAAXXSASGASSSIGVASSNGVASSSTTATKTRISAGSXGSSTSXKSSSSASTAASTDLSGSRSHALSSSSSGQDNIVGDDFGLGYISGGILPVNTAALNFPSDLGSLXSGLLSSLDGPVLPSVEYRITSLTSSVLSLLSTSGGAFNYSSFAKNLAILAYQISVSNPXLSVSQVVSETLLESVGALIHILVSSQVG

SEQ ID NO: 48 - DNA, 738 bp, Aliatypus gnomus
  CDS (1)..(738)
agagtgacatcgggagccgatgctcatgcttacgctgaagcaatttcgggcgcactctctcatgcattactttacaccggaacattgaattctgctaacgccaattctcttgcctacgcctttgcttacgctttcgtcaatgtcgccgcgcaggccgcatcttcatccgcatctggagcatcatcttcaatcggagtaggatcttcaaacggagtagcatcgagcagcacgaccgctacaaaaacgaggatttccgcaggttcctcgggcagctcgacttctgcgaaatcaagcagttcagcttctactgccgcccccagcgatttgtctggttccaggtcacatgctctatcatcgtcgaattctggacaagacaatattgtaggtgatgactttggtttgggatacatttctggtgggattcttccagttaacactcctgctttgaattttccttctgatttgggttcggtaacgtctggcttgctctcttctctagatgggcctgttttaccttctgttgagtatagaataacttctttgacttcatcagtactttctttactttccactagtggaggtgcctttaattattcgtccttcgcgaagaacttggctattttggcatatcaaatcagtgttagcaatcctgggctgtctgtatctcaagtggtttcggaaactctgctcgaatctgtcggtgcattaatccatattttagtgtcttcacaggttgga

SEQ ID NO: 49 - protein, 246 aa, Aliatypus gnomus
RVTSGADAHAYAEAISGALSHALLYTGTLNSANANSLAYAFAYAFVNVAAQAASSSASGASSSIGVGSSNGVASSSTTATKTRISAGSSGSSTSAKSSSSASTAAPSDLSGSRSHALSSSNSGQDNIVGDDFGLGYISGGILPVNTPALNFPSDLGSVTSGLLSSLDGPVLPSVEYRITSLTSSVLSLLSTSGGAFNYSSFAKNLAILAYQISVSNPGLSVSQVVSETLLESVGALIHILVSSQVG

SEQ ID NO: 50 - DNA, 1904 bp, Aphonopelma seemanni
  CDS (1)..(1734)
tttcaggccgattcacagcgacacgaccaactccccctggcgaccaaaaaagccttgctgtcttctgtaacgaacagaggagtgttcctttctttgacaggactttcgcctgaagctatatctattctctcaagctgtgcgggagacacagcagcccaactaggaatacctgacttgaaatcaattatcagctcagaagtgaagcgtgcttttacagatatgagtccgaacgcgagtcctcttacccttgcggaagtactgtcatccatcctgacaaatatttttgaagggtacggtagcttagaccacagtaatgcccagtactttggaagcgaatttggaaaaatgatgtgcgataagttcttttcttctgcttcccgggacgtagtatccgcatctgtaaccaaaactgtcgaaacttcgtcgtcgtccagagatatttcttcagtgcgttctgcatgtgacttattctcggagtcattcgtaaacacactgtcggggcaaaaagctttgtatccggccctaggaaaagacattttagcagctgatattattgattgcgttccagatatattaaactcactaatgtcaacaggagtagttttcaccgatggctcaagactccaaagcatgttgcaaaacactatgaaaagcatcccaagaggatcaggacctggtgttttatgtcagagaatagcagttccatttgcggagatgctttccgccgatgggaaactaaactcttctaatgcgtcagagctcggaaggatgataggcttatgtgtcactcgtgtcctcttacgaccagtttaccgtggtggaagttcggcatcggattcaacattgtttaccagcgcaggccaggaacgcacagcgtcatcgacgctctccagtacttcgagagatttcagaacgagcagccaatcgacgtacagagccgcacaaactgaatcttcccccggtacctcatcgccttccgaaaaattcaaaaaatccttgctgtcttctctaacggacagaagagtgttcctttctttgacaggattttcgcctgaagctatatctattctctcaagctgtgcgggagacacagcagcccaactaggaatacctgacttgaaatcaattatcaactcagaagtgaagcgtgcttttacagatatgagtccgaacgcgagtcctcttacccgtgcggaggtaatatcatccatcctgacaaatatttttgaagggtacggtagcttagaccacagtaatgcccagtacttcggaagcgaatttggaaaaatgatgtgtgataagctgtattttgcttttggagggggcaccgtgaggtcgacatcacgtgttcctgcttctgaagagtcatatggaagttttagggaaagtactaagtcttattcttctgtgttttcggaagaagcgagttctgtcttcagtcgtttgggtgctcttgcttttggcgtttcatcctctgaaaatttaccttctgtagccgagagacggatatctagcttagaatccttgatattttcttcgataacaacaggtaacttcacctcttcctctttttcgagaattttgtcatctgttgtttctgagataatgaaaagtgaacctgatttatcttctcgtgaagttattatggaatgtctccttgaggttatagctgcaatgataaaaatcgccttggcaggagtttcatctgacggcattcctagtgttaaattataactgttccccatggaaaacttccttttcttttttgtaactgaattggtaaaaaaaaactttatcttgtatgtaaaatttttaaaatgaaaacacattttgcattattgtttcttcggttacggtcttgtaattaattgttggaataaagaatgttttaaaaaaaaaaaaaa

SEQ ID NO: 51 - protein, 577 aa, Aphonopelma seemanni
FQADSQRHDQLPLATKKALLSSVTNRGVFLSLTGLSPEAISILSSCAGDTAAQLGIPDLKSIISSEVKRAFTDMSPNASPLTLAEVLSSILTNIFEGYGSLDHSNAQYFGSEFGKMMCDKFFSSASRDVVSASVTKTVETSSSSRDISSVRSACDLFSESFVNTLSGQKALYPALGKDILAADIIDCVPDILNSLMSTGVVFTDGSRLQSMLQNTMKSIPRGSGPGVLCQRIAVPFAEMLSADGKLNSSNASELGRMIGLCVTRVLLRPVYRGGSSASDSTLFTSAGQERTASSTLSSTSRDFRTSSQSTYRAAQTESSPGTSSPSEKFKKSLLSSLTDRRVFLSLTGFSPEAISILSSCAGDTAAQLGIPDLKSIINSEVKRAFTDMSPNASPLTRAEVISSILTNIFEGYGSLDHSNAQYFGSEFGKMMCDKLYFAFGGGTVRSTSRVPASEESYGSFRESTKSYSSVFSEEASSVFSRLGALAFGVSSSENLPSVAERRISSLESLIFSSITTGNFTSSSFSRILSSVVSEIMKSEPDLSSREVIMECLLEVIAAMIKIALAGVSSDGIPSVKL

SEQ ID NO: 52 - DNA, 1634 bp, Aphonopelma seemanni
  CDS (2)..(1450)
ggcaaggtcgttcgctgaggcttttgtaggaaattgtctaaaagatccgatattcatttccatcttcagaaaagttgcatcatcagccgaagctagttcttacacatcagctggggttcagtcagcgataagatccctaggattaggacttgattttgtttcaggaacatcagatcttgtcgcaagcaagattgcaaatgttgccgttggatcaagccccagtgagtacgctgaagccatcgcttcggtaatttcaagcatagtgagtagtgcgggcgtgttgaaccattccaatcccaccacactcggaatgcaggtagcgataggtttctgccgaggccttgcatcatccgcttacccagactccggcgaaccactaggctcacctttcactggcggtgcagcacaggtgggcgcagcatcgtccgcaatttccagcgcatccgcaacggtcacagaaagcagtgtagctgccagtagagcagaaatttctagtcgtggcgcagacgttgctgcggcggcatcttctttcaagcaggtcttcatgtcgtccctctgccaaagcgaagcgttcaattctgccttcagttctccagcatccttttctgctgctgtctcctgcattttaagtgctgtcgaagctgctacaaaggaagtaggaatgggaaacttggcctcggaaatggcgcacgcaacgtcaagggccgctgcgagaaaaagtgcaggatccggttctaccgcatttgctgagtcttttgcatcagaaataggaagcgtacttttcgtcaggggaatcctaaacgtgaataatgccgcttatattgcagcccgactagtgaaggtactgcttcgtatcttttcgcttacttttacagttcctactgctcctggtggtgtgtcgtcgggatctgcaacggcagctgctggagcgacgtcgatttctgcaaacgtaccctctgcagggtatggtaatttgtttcccgtgcgcttgtcagcaccggaatccgcaggaggttcttttactaccggtgctgagaatattgttgttgttgattctaatttgcctgcgggttctttgatgtcaggcgacgatcagccattatttagtagtttgtcaggttctgttgcacaagttttatcatctgttgaaggtctgctgtctcctgcagcaagtagaaggatttccgctctgattcggtctattgtgtccgaactgtcaacaggtagattgaaaccttcttttctgaagaatgtattagcatttgttttgtctcaaatatcgcagactggagccggttttagtgcttcacaaattacgatcgaagggctcttggaaattttgactgctctgttgcatatcctgctttcttctcaaattgggcctttaaattccagcacaactgtttcttctgatgtcgttgaggctgtctctagtgctttcctcaactaattttttttctacattccgggagattaagtaatatgcattagttagctaatcttaatattccctgggtttatttgctgcgtatcattttttttaattactgtatcattgtaatttctggatgatttggttcttcggttgtggttattgaaatgcaataaagaatattgaagtaaaaaaaaaaaaa

SEQ ID NO: 53 - protein, 482 aa, Aphonopelma seemanni
ARSFAEAFVGNCLKDPIFISIFRKVASSAEASSYTSAGVQSAIRSLGLGLDFVSGTSDLVASKIANVAVGSSPSEYAEAIASVISSIVSSAGVLNHSNPTTLGMQVAIGFCRGLASSAYPDSGEPLGSPFTGGAAQVGAASSAISSASATVTESSVAASRAEISSRGADVAAAASSFKQVFMSSLCQSEAFNSAFSSPASFSAAVSCILSAVEAATKEVGMGNLASEMAHATSRAAARKSAGSGSTAFAESFASEIGSVLFVRGILNVNNAAYIAARLVKVLLRIFSLTFTVPTAPGGVSSGSATAAAGATSISANVPSAGYGNLFPVRLSAPESAGGSFTTGAENIVVVDSNLPAGSLMSGDDQPLFSSLSGSVAQVLSSVEGLLSPAASRRISALIRSIVSELSTGRLKPSFLKNVLAFVLSQISQTGAGFSASQITIEGLLEILTALLHILLSSQIGPLNSSTTVSSDVVEAVSSAFLN

SEQ ID NO: 54 - DNA, 1464 bp, Aphonopelma seemanni
  CDS (2)..(1279)
aaaatgtctgtcccgttacaacctaataaattcacaagaccccactccctcagcaagaaagttgggaaaagctatatccagcggcgccgcctcagcagcagcttccgcttctgcagcgtcagcagccgccacggcagtagcagctgcctcgttctctgcttccacgacaacaacagccacatccacgtccgcagcagctacaggagccgccgccgcagcgggaggagaagcagccgcggtatcctcgacagcctcgtcgtcgttcttacaagccctggtatcttccattttggagaggcccgaattccttgtccctttgagccatgctacatcagccagttctgcatatgccataacgtcgaccatcgtccgggatgctgcatatgaaactgaattcagtaaatgggctacacagatgagcagcgccgctgcaaaagaagtagcagaggtaggttccggcgcttctgcctatgactacgcttacgctatggcaaggggtttgacaaaatgtctgtcccgttacaacctaataaattcacaagaccccactccctcagcaagaaagttgggaaaagctatatccagcagcgccgcctcagcagcagcttcagcttctgcagcttcagcagccgccacggcatcagcagctgcctcgtcctctgcttccacgacaagaacaaccggagcaacgtccgcagcaggagatttttcagtagtagctgatgcatcagcagattcttcagtactcgcagacgaagcggcacgtggtgccgtaggagctgtatcaggtggtggcgctgcatcgcggtctgttggattgatcggttccggtttccctggttacgtgagctcagcgccattctccttaatttcttctgtggctggaggtggtggctctagtccggttcctgtgtcacccttagcaggaggactgttaccaccttcttcatatttatcatcgccagcggctgctgaaagaatttcatccgtgatacctttgttgttgtcggggatatctcccaatcgtttggatgcttcccttctcggaaacactttgggttccttggtggcccaggtatccttgaatcgcgcgggattatcgttctctcagatcatcgttgaggctctacttgaattattgtgtggagttattcagatcctttctttcgctgaaattactgttgtgaatacgggaacactgagttctacttcctttgcattggctcaagctatgtctgctgctgttcggaatacatatagatttcactctacagtgtgagtcgtgtttgtaaggaaaacttgaaatagctgtaactcattctattaatttttttttttattaatggtattacaagtgtttgttttgtgtttgtcactctcttctatctgaaatatgggtaagggctgtaacctgtaatcaaagtggtattcctattaaacgcaatgtaatgaaaaaaaaaaaaa

SEQ ID NO: 55 - protein, 425 aa, Aphonopelma seemanni
KCLSRYNLINSQDPTPSARKLGKAISSGAASAAASASAASAAATAVAAASFSASTTTTATSTSAAATGAAAAAGGEAAAVSSTASSSFLQALVSSILERPEFLVPLSHATSASSAYAITSTIVRDAAYETEFSKWATQMSSAAAKEVAEVGSGASAYDYAYAMARGLTKCLSRYNLINSQDPTPSARKLGKAISSSAASAAASASAASAAATASAAASSSASTTRTTGATSAAGDFSVVADASADSSVLADEAARGAVGAVSGGGAASRSVGLIGSGFPGYVSSAPFSLISSVAGGGGSSPVPVSPLAGGLLPPSSYLSSPAAAERISSVIPLLLSGISPNRLDASLLGNTLGSLVAQVSLNRAGLSFSQIIVEALLELLCGVIQILSFAEITVVNTGTLSSTSFALAQAMSAAVRNTYRFHSTV

SEQ ID NO: 56 - DNA, 1833 bp, Atypoides riversi
  CDS (3)..(1712)
agaaagagcagctggtggaaagggagctgctggaggagatggagctgctggtggagcaggaggatatgggagagaaggagcagcatctgctgaagcaaaagcatatgctgaagcaagagcaggaggatatggtagagaaaggagcagctggaggagaaggagctgctggtggagcaggaggatatgggagagaaggagcagcatctgctgaagcaaaagcgtatgctgaagcaagagcaagaggatatggtagagaaagagcagctggtggaaagggagctgctggaggagatggagctgctggtggagcaggaggatatgggagagaaggagcagcatctgctgaagcaggagcaagagcaggagaatatggtggagacggtgcagctggtagagaggaagcagctggaggagaaggagctgctggtggagcaggaggatatgggagagaaggagcagcatctgctgacgcaaaagcatatgctgaagcaagagcaagaggatatggtagagaaagagcagctggtggaaagggagctgctggaggagatggagctgctggtggagcaggaggatatgggagagaaggagcagcatctgctgaagcaggagcaagagcaggagaatatggtggagaaggagcagctggtggagagggagcagctggaggagaaggagctgctggtggagaaggaggatatgggagagaaggagcagcatctgctgaagcaaaagcatatgctgaagcaagagaaggaggatatggtagagaaagaggcgctggtggagaaggagctgaaggagcaggaggatatgctaaagctggaggatatggtgatgcaagagcaagaggatatgcaggagcagctggtgaagcagatgcagctggtagagcaggaggatatgcaggagcagctggtggagcagatgcagctggtagagcaggaggatatggtagtgaaggagcagcatctgctgaagcaagagcatatgctgaagcaagagcaagaggatatggtagagaaagagcagctggtggaaagggagctgctggaggagatggagctgctggtggagcaggaggatatgggagagaaggagcagcatctgctgaagcaaaagcatatgctgaagcaagagcaggaggatatggtagagaaagggcagctggtggagaaggagctgaaggagcaggaggatatgcaggagcagctggtggagcagatgcagctggtagagcaggaggatatgatggagctggacggtatattggagcaagggcaggaggatatgcaagagcagaaggatatagtagattaggagaatatgctgaagcaggatcagctggtggtgcaggagcagctggtgttaatttagatctaagtttgggatcttttcagtcagctgtaccttctctttctcagttgatgtctccggaggcaggccaaagaatatcttctataaaattagcagctctttcttctttgtccagttcaggtttcgattatatacgttttgttagtattttgcatagaatagcttctcaagttggatcagtgggttctgtgtctgtaatggttgaagtgctgttggaagtggtaaatgctttgtcacaaatattgacttcatgccatattgaaaatgcttctattgtttcttgtcccaattcgactagatctttttccgaggctttttctaaaatttttgtctaaattttattcccccttcaccatttcaaattttatgctttattaatgaaactataactgttatttcctaagaacgataaggtaataaaaatttgaattgctaagatgaaaaaaaaaaaaaaaa

SEQ ID NO: 57 - protein, 569 aa, Atypoides riversi
KEQLVERELLEEMELLVEQEDMGEKEQHLLKQKHMLKQEQEDMVEKGAAGGEGAAGGAGGYGREGAASAEAKAYAEARARGYGRERAAGGKGAAGGDGAAGGAGGYGREGAASAEAGARAGEYGGDGAAGREEAAGGEGAAGGAGGYGREGAASADAKAYAEARARGYGRERAAGGKGAAGGDGAAGGAGGYGREGAASAEAGARAGEYGGEGAAGGEGAAGGEGAAGGEGGYGREGAASAEAKAYAEAREGGYGRERGAGGEGAEGAGGYAKAGGYGDARARGYAGAAGEADAAGRAGGYAGAAGGADAAGRAGGYGSEGAASAEARAYAEARARGYGRERAAGGKGAAGGDGAAGGAGGYGREGAASAEAKAYAEARAGGYGRERAAGGEGAEGAGGYAGAAGGADAAGRAGGYDGAGRYIGARAGGYARAEGYSRLGEYAEAGSAGGAGAAGVNLDLSLGSFQSAVPSLSQLMSPEAGQRISSIKLAALSSLSSSGFDYIRFVSILHRIASQVGSVGSVSVMVEVLLEVVNALSQILTSCHIENASIVSCPNSTRSFSEAFSKIFV

SEQ ID NO: 58 - DNA, 5023 bp, Atypoides riversi
cgaaagtggttctggatctagttcttatgcaagagcatatgccgtcgcaaaatcatctgctgtagtgcttcaaaatagtggagtcctctcttcttctaattcacgtagtttgtcttctgcttttgctaaagcatttgctagcagctcggcatcgtcttatgcctcttaccaatccagaaatacaggaacatcacgagcatcttcagcaggcagtggcgctgcaggctctgcaaccagttcaacaaccaccaccacgacagtttcaaagtctgcagcagctgccgccgctgccgcagccgccgctagttctgctagctctgcatccagagattctgatagatcttccaccgcagctgaggcatatgcctcatcttctgcatacgcgtcctctaattttgaaaattacctggcttcagacctatcgaactcagacgaattcgaatcagtttacgggtcgttatattcatcagctgatgccgctagttatgccagatcttctgcagagtatgcttcaaataccctcggactgagcaaagaaacttcatatgctctagcaagcgccgccgcaaaggctgtttccgaaagtggttctggatctagttcttatgcaagagcatatgccgtcgcaaaatcatctgccgtagtgcttcaaaatagtggagtcctctcttcttctaattcacgtagtttgtcttctgcttttgctaaagcatttgctagcagctcggcatcgtcttatgcctcttaccaatccagaaatacaggaacatcacgagcatcttcagcaggcagtggcgctgcaggctctgcaaccagttcaacaaccaccaccacgacagtttcaaagtctgcagcagctgccgccgctgccgcagccgccgctagttctgctagctctgcatccagagattctgatagatcttccaccgcagctgaggcatatgcctcatcttctgcatacgcgtcctctaattttgaaaattacctggcttcagacctatcgaactcagacgaattcgaatcagtttacgggtcggtatattcatcatctgatgccgctagttatgccagatcttctgcagggtatgcttcaaataccctcggactgagcaaagaaacttcatatgctctagcaagcgccgccgcaaaggctgtttccgaaagtggttctggatctagttcttatgcaagagcatatgccgtcgcaaaatcatctgccgcagtgcttcaaaatagtggagtcctctcgtcttctaattcacgtagtttgtcttctgcttttgctaaagcatttgctagcagctcggcatcgtcttatgcctcttaccaatccagaaatacaggaacatcacgagcatcttcagcaggcagtggcgctgcaggctctgcaaccagttcaacaaccaccaccacgacagtttcaaagtctgcagcagctgccgccgctgccgcagccgccgctagttctgctagctctgcatccagagattctgatagatcttccaccacagctgaggcatatgcctcatcttctgcatatgcgtcctctaattttgaaaattacctggcttcagacctatcgaactcagacgaattcgaatcagtttacgggtcggtatattcatcatctgatgccgctagttatgccagatcttctgcagggtatgcttcaaataccctcggactgagcaaagaaacttcatatgctctagcaagcgccgccgcaaaggctgtttccgaaagtggttctggatctagttcttatgcaagagcatatgccgtcgcaaaatcatctgccgtagtgcttcaaaatagtggagtcctctcttcttctaattcacgtagtttgtcttctgcttttgctaaagcatttgctagcagctcggcatcgtcttatgcctcttacaaatccagaaatacaggaacatcacgagcatcttcagcaggcagtggcgctgcaggctctgcaaccagttcaacaaccaccaccacgacagtttcaaagtctgcagcagctgccgccgctgccgcagccgccgctagttctgctagctctgcatccagagattctgatagatcttccaccgcagctgaggcatatgcctcatcttctgcatacgcgtcctctaattttgaaaattacctggcttcagacctatcgaactcagacgaattcgaatcagtttacgggtcgttatattcatcatctgatgccgctagttatgccagatcttctgcagggtatgcttcaaataccctcggactgagcaaagaaacttcatatgctctagcaagcgccgccgcaaaggctgtttccgaaagtggttctggatctagttcttatgcaagagcatatgccgtcgcaaaatcatctgctgtagtgcttcaaaatagtggagtcctctcttcttctaattcacgtagtttgtcttctgcttttgctaaagcatttgctagcagctcggcatcgtcttatgcctcttacaaatccagaaatacaggaacatcacgagcatcttcagcaggcagtggcgctgcaggctctgcaaccagttcaacaaccaccaccacgacagtttcaaagtctgcagcagctgccgccgctgccgcagccgccgctagttctgctagttctgcacgcagagattctgatagatcttcctccacagctgaggcatatgcctcatcttctgcatacacgtcctctaattttgaaaattacctggcttccgacctatcgagctcagacgaattcgaatcagtttacgggtcgttatattcatcatctgatgccgctagttatgccagatcttctgcagagtatgcttcaaataccctcggactgagcaaagaaacttcatatgctctagcaagcgccgccgcaaaggctgtttccgaaagtggttctggatctagttcttatgcaagagcatatgccgtcgcaaaatcatctgctgtagtgcttcaaaatagtggagtcctctcttcttctaattcacgtagtttgtcttctgcttttgctaaagcatttgctagcagctcggcatcgtcttatgcctcttacaaatccagaaatacaggaacatcacgagcatcttcagcaggcagtggcgctgcaggctctgcaaccagttcaacaaccaccaccacgacagtttcaaagtctgcagcagctgccgccgctgccgcagccgccgctagttctgctagctctgcatccagagattctgatagatcttccaccgcagctgaggcatatgcctcatcttctgcatacgcgtcctctaattttgaaaattacctggcttcagacctatcgaactcagacgaatttgaatcagtttacgggtcgttatattcatcagctgatgccgctagttatgccagttcttcttcagagtatgcttcaaataccctcggactgagcaaagaaacttcatatgctctagcaagcgccgccgcaaaggctgtttccgaaagtggttctggatctagttcttatgcaagagcatatgccgtcgcaaaatcatctgctgtagtgcttcgaaatagtggagtcctctcttcttctaattcacgtagtttgtcttctgcttttgctaaagcatttgctagcagctcggcatcgtcttatgcctcttacaaatccagaaatacaggaacatcacgagcatcttcagcaggcagtggcgctgcaggctctgcaaccagttcaacaaccaccaccacgacagtttcaaagtctgcagcagctgccgccgctgccgcagccgccgctagttctgctagttctgcacgcagagattctgatagatcttcctccacagctgaggcatatgcctcatcttctgcatacacgtcctctaattttgaaaattacctggcttcagacctatcgagctcagacgaattcgaatcagtttacgggtcgttatattcatcatctgatgccgctagttatgccagatcttctgcagagtatgcttcaaataccctcggactgagcaaagaaacttcatatgctctagcaagcgccgccgcaaaggctgtgtccgaaagtggttctggatctagttcttatgcaagagcatatgccgtcgcaaaatcatctgctgtagtgcttcaaaatagtggagtcctctcttcttctaattcacgtagtttgtcttctgcttttgctaaagcatttgctagcagctcggcatcgtcttatgcctcttccaaatccagaaatacaggaacatcacgagcatcttcagcaggcagtggcgctgcaggctctgcaaccagttcaacaaccaccaccacgacagtttcaaagtctgcagcagctgccgccgctgccgcagccgccgctagttctgctagctctgcatccagagattctgatagatcttcctccgcagcaaaggcatatgcctcatcttctgctaacgcgtcctctaattttgaaaattaccagacttcagacttatcgcgcccatatgcaacttccagtaatgcacctgcttccacttctggcattaagaatgacctcagtcctttaatttcagggttgatttcctcttcttctggacttggttcttctgacgcgtcggaccgaatatcttatttacttacatctttgctttctgtaataaattcggaaggtgggcgtatcgatttcgctgctgttgctaacattttggtttcattggtatctgaaataagagccaaaaattctgaattgtcttattttcatattttgattgaagcgctatttgaagtgttatcggcggttttgcagattatatcttcttcgcatattgtaattggtaatgcttcattttccagttcgtctaatttagcatttgctgatgcctgcgctaaagcgttttcttaagtaatctcttatcttgtttattccaaatttacttttttttccatattttttcccctttttatatattctttctttaatatttgtcaatctgtactattttgttttgtgaattaaaataaaagcaatcttataaagttaaaa

SEQ ID NO: 59 - protein, 1620 aa, Atypoides riversi
ESGSGSSSYARAYAVAKSSAVVLQNSGVLSSSNSRSLSSAFAKAFASSSASSYASYQSRNTGTSRASSAGSGAAGSATSSTTTTTTVSKSAAAAAAAAAAASSASSASRDSDRSSTAAEAYASSSAYASSNFENYLASDLSNSDEFESVYGSLYSSADAASYARSSAEYASNTLGLSKETSYALASAAAKAVSESGSGSSSYARAYAVAKSSAVVLQNSGVLSSSNSRSLSSAFAKAFASSSASSYASYQSRNTGTSRASSAGSGAAGSATSSTTTTTTVSKSAAAAAAAAAAASSASSASRDSDRSSTAAEAYASSSAYASSNFENYLASDLSNSDEFESVYGSVYSSSDAASYARSSAGYASNTLGLSKETSYALASAAAKAVSESGSGSSSYARAYAVAKSSAAVLQNSGVLSSSNSRSLSSAFAKAFASSSASSYASYQSRNTGTSRASSAGSGAAGSATSSTTTTTTVSKSAAAAAAAAAAASSASSASRDSDRSSTTAEAYASSSAYASSNFENYLASDLSNSDEFESVYGSVYSSSDAASYARSSAGYASNTLGLSKETSYALASAAAKAVSESGSGSSSYARAYAVAKSSAVVLQNSGVLSSSNSRSLSSAFAKAFASSSASSYASYKSRNTGTSRASSAGSGAAGSATSSTTTTTTVSKSAAAAAAAAAAASSASSASRDSDRSSTAAEAYASSSAYASSNFENYLASDLSNSDEFESVYGSLYSSSDAASYARSSAGYASNTLGLSKETSYALASAAAKAVSESGSGSSSYARAYAVAKSSAVVLQNSGVLSSSNSRSLSSAFAKAFASSSASSYASYKSRNTGTSRASSAGSGAAGSATSSTTTTTTVSKSAAAAAAAAAAASSASSARRDSDRSSSTAEAYASSSAYTSSNFENYLASDLSSSDEFESVYGSLYSSSDAASYARSSAEYASNTLGLSKETSYALASAAAKAVSESGSGSSSYARAYAVAKSSAVVLQNSGVLSSSNSRSLSSAFAKAFASSSASSYASYKSRNTGTSRASSAGSGAAGSATSSTTTTTTVSKSAAAAAAAAAAASSASSASRDSDRSSTAAEAYASSSAYASSNFENYLASDLSNSDEFESVYGSLYSSADAASYASSSSEYASNTLGLSKETSYALASAAAKAVSESGSGSSSYARAYAVAKSSAVVLRNSGVLSSSNSRSLSSAFAKAFASSSASSYASYKSRNTGTSRASSAGSGAAGSATSSTTTTTTVSKSAAAAAAAAAAASSASSARRDSDRSSSTAEAYASSSAYTSSNFENYLASDLSSSDEFESVYGSLYSSSDAASYARSSAEYASNTLGLSKETSYALASAAAKAVSESGSGSSSYARAYAVAKSSAVVLQNSGVLSSSNSRSLSSAFAKAFASSSASSYASSKSRNTGTSRASSAGSGAAGSATSSTTTTTTVSKSAAAAAAAAAAASSASSASRDSDRSSSAAKAYASSSANASSNFENYQTSDLSRPYATSSNAPASTSGIKNDLSPLISGLISSSSGLGSSDASDRISYLLTSLLSVINSEGGRIDFAAVANILVSLVSEIRAKNSELSYFHILIEALFEVLSAVLQIISSSHIVIGNASFSSSSNLAFADA

SEQ ID NO: 60 - DNA, 409 bp, Hexura picea
  CDS (2)..(253)
ctctgaattatctgccggaggtgctgttaattattcgtcacttgcaaacaccttggtttctttagcaaatcaaattggttctagcagttctggattgtccacatcacaaattcagatcgaaactctccttgaaactgtgtacgcactgactcagattttatcgtcatcgcaaatcggatatgtcagtactgccaattctagtgcatctgctagtgcatttgcccaagctctttctcaagcaattgctaattgaagttttatcttttttctggtatattaattttatttcttgattatgtatctaattctattttattttatttttttctctcgttttcctttattttgctctccgttatttgttctttacctttaattattgcttctaaaatgtaaaaaaaaaaaaaaa

SEQ ID NO: 61 - protein, 83 aa, Hexura picea
SELSAGGAVNYSSLANTLVSLANQIGSSSSGLSTSQIQIETLLETVYALTQILSSSQIGYVSTANSSASASAFAQALSQAIAN

SEQ ID NO: 62 - DNA, 1257 bp, Megahexura fulva
  CDS (1)..(1065)
aattcagggaactatttacaacttgctaattccctggcatattcgttcggatctagtctgtaccaatattcgtcttcagctgctggcgccggggcaggtgcagcatcgtcgggaggagcttccggctcgtcgagttcatcgacaacgaccacgacaacaacgtcagcatctgcagcagcagcggccgccgccgcagcctcagccgcagcgtccacttctgcttcggcgtctgcttcggctagcgcatccgcatcagcattttcccaaactttctcccaaacggttctacagtcagcatcatacggctcctatttcggaggcagcctatccctgcaatcggcacaagccgccgcatcagcagctgcccaagccgctgcactacagatcggtcttggatcgtacggtaatgctctcgcaagcgctgtcggaagtgctgtcggaagcgctggcgctaatgccggtgcttatggcttcactcaggccgctgcaagcgctgttgcttctgttctgttacaagcgggagttttgaactacggtaacgccaccgcccttgcctcagcctatgcaagcgcttatgcaagcagtgtcgcttcggctgccgcgtcagcatctgccggtgcttcggcatcaagcggtgcgtctgcctatgcctccgccgttgccgctgctgccgccgcagcttccgtgtctacttctgccggcgcatcagcttctgccggcgcatcgggtttatctttctcccaggctcaagcttctgccctctcatcgtcagcagccgcttatagaatatcttctttgattaccagttttgtctcaggtctttctgccggtggaggaagtgtgaattattctgttattgctaatgctttggcttctgtggcttcccaaatcagtgccagcaatgccggactttctgtatcccaagttgcagttcaagctctgcttgaattttctactgcattaatccagattttggcttcttcccaaattggatacgttaatacagcaagtgctgggtcgactgcttcagccttttcccaggctttggctcaaaccttcgcttaatgacttttaaaccaacatttataaaaaaaaattatcgtattttttgaaattgtaaggggtttgaggtttttttaattttttaacagcatgttatacctccattgctttattttcttcaaataaatgtttacggaaatgaattcttttttatccttgatttgaataaaagcatttgaaaaggcaaaaaaaaaa

SEQ ID NO: 63 - protein, 354 aa, Megahexura fulva
NSGNYLQLANSLAYSFGSSLYQYSSSAAGAGAGAASSGGASGSSSSSTTTTTTTSASAAAAAAAAASAAASTSASASASASASASAFSQTFSQTVLQSASYGSYFGGSLSLQSAQAAASAAAQAAALQIGLGSYGNALASAVGSAVGSAGANAGAYGFTQAAASAVASVLLQAGVLNYGNATALASAYASAYASSVASAAASASAGASASSGASAYASAVAAAAAAASVSTSAGASASAGASGLSFSQAQASALSSSAAAYRISSLITSFVSGLSAGGGSVNYSVIANALASVASQISASNAGLSVSQVAVQALLEFSTALIQILASSQIGYVNTASAGSTASAFSQALAQTFA

SEQ ID NO: 64 - DNA, 3513 bp, Liphistius malayanus
  CDS (2)..(3103)
ggcagaagcaagaagtgcatcatattctggggcagtggcaaaatccttcgccgaatctttcgccgatgttatacgcaggaacgacaggtatggttcgtcctacgattcagacttggtttcgcgatatccatctgcatacgacgatgcgatctcagaggccttatatcagaatacctattttaggggcatcaatagagttgccattgcagaagcagttgcacgcgctagggcggaagctggtgctggagcgagcagttctgcgtatgcagagtcacatgcctcggcattggtccggctattgcagagttacagagtgatcacacgcgacatcgtcttaagtgttgcagaagccactgccactgcttttgctagtgcagttgcaaaggcaacgtcacatgctcgtgccgaatcctcagcagctgctttggcgaaagccgctgcgtcatccgaggctaagtcctccaccgtcactataacgaccagtgaagcacgggcagcagctgcggctgaagcgtctgctgaatcatctgcgtcgtcttcgtcagaggcagaagcaagaagtgcatcatattctggggcagtggcaaaatccttcgccgaatctttcgccgatgttatacgcaggaacgacaggtatggttcgtcctacgattcagacttggtttcgcgatatccatctgcatacgacgatgcgatctcagaggccttatatcagaatacctattttaggggcatcaatagagttgccattgcagaagcagttgcacgcgctagggcggaagctggtgctggagcgagcagttctgcgtatgcagagtcacatgcctcggcattggtccggctattgcagagttacggagtgatcacacgcgacatcgtcttaagtgttgcagaagccactgccactgcttttgctagtgcagttgcaaaggcaacgtcacatgctcgtgccgaatcctcagcagctgctttggcgaaagccgctgcgtcatccgaggctaagtcctccaccgtcaccataacgaccagtgaagcacgggcagcagctgcggctgaagcgtctgctgaatcatcggcgtcgtcttcgtcagaggcagaagcaagaagtgcatcatattctgaggcagtggcaaaatccttcgccgaatctttcgccgatgttatacgcaggaacgacaggtatggttcgtcctacgattcagacttggtttcgcgatatccatctgcatacgacgatgcgatctcagaggccttatatcagaatacctattttaggggcatcaatagagttgccattgcagaagcagttgcacgcgctagggcggaagctggtgctggagcgagcagttctgcgtatgcagagtcacatgcctcggcattggtccggctattgcagagttacggagtgatcacacgcgacatcgtcttaagtgttgcagaagccactgccactgcttttgctagtgcagttgcaaaggcaacgtcacatgctcgtgccgaatcctcagcagctgctttggcgaaagccgctgcgacatccgaggctaagtcctccaccgtcaccataacgaccagtgaagcacgggcagcagctgcggctagagcgtatgctgaatcatctgcgtcgtcttcgtcagaggcagaagcaagaagtgcatcatattctggggcagtggcaaaatcctacgccgaatctttcgccgatgttatacgcaggaactacaggtatggttcgtcctacgattcagacttggtttcgcgatatccatctgcatacgacgatgcgatcacagaggccttatatcagaatacctattttaggggcatcaatagagttgccattgcagaagcagttgcacgcgctagggcggaagctggtgctggagcgagcagttctgcgtatgcagagtcacatgcctcggcattggtccggctattgcagagttacggagtgatcacacgcgacatcgtcttaagtgttgcagaagccactgccactgcttttgctagtgcagttgcaaaggcaacgtcacatgctcgtgccgaatcctcagcagctgctttggcgaaagccgctgcgtcatccgaggctaagtcctccaccgtcaccataacgaccagtgaagcacgggcagcagctgcggctagagcgtctgctgaatcatctgcgtcgtcttcgtcagaggcagaagcaagaagtgcatcatattctggggcagtggcaaaatccttcgccgaatctttcgccgatgttatacgcaggaacgacaggtacggttcgtcctacgattcagacttggtttcgcgatatccatctgcatacgacgatgcgatctcagaggccttatatcagaatacctattttaggggcatcaatagagttgccattgcagaagcagttgcacgcgctagggcggaagctggtgctggagcgagcagttctgcgtatgcagagtcacatgcctcggcaatggtccggctattgcagagttacggagtgatcacacgcgacatcgtcttaagtgttgcagaagccactgccactgcttttgctagtgcagttgcaaaggcaacgtcacatgctcgtgccgaatcctcagcagctgctttggcgaaagccgctgcgtcatccgaggctaagtcctccaccgtcaccataacgaccagtgaagcacggccagcagctgcggctgaagcgtctgctgaatcatctgcgtcgtcttcgtcagaggcagcgtcaagtagttcaggatcttcttatgtatctgctgtattacgatccagtgattcaaggactgaatctctgtttaagtctatgttatacggtcctttctcagatgtaatatctgagttaccggatatgcaatcatctgaatcagtttcaggaatttctctaatgaaggaaggtattctgtcatctcttgacagtgattattctgggtttaattatgagaaatttacaaatagtattatgtcattaagaaatgatatttcagttaaatatccaagtttatcggcccgtgacattttgctgtatttgctgagttgtgctctttgtgcttgttttaaggtaataagtgaatatcatgggatcaacgtttagttgtatagtatagaaatatttaatgttccccttgaagtggtattataattgctgctccctctggtaaattactgctcaataatatttttatagaacggttgttttagaagtgtttcccttagtgttttaggattatgtatcatgaaatattatttttcttgacggatgtaaggagtagttaagaaactttgaattttgattttgtgaaaaagattgattgttgcacagaaatatgtgatgttgtttactgagtggaaacaagttaaattttaaatgcaaattatatgaaaactgtttttgaatgaatttttttttatttgcaatcattgctttaagatttccctgtatttctcgattgttttaagtttgaattcggaattttcaataaacatttttcatttcaaaaaaaa

SEQ ID NO: 65 - protein, 1033 aa, Liphistius malayanus
AEARSASYSGAVAKSFAESFADVIRRNDRYGSSYDSDLVSRYPSAYDDAISEALYQNTYFRGINRVAIAEAVARARAEAGAGASSSAYAESHASALVRLLQSYRVITRDIVLSVAEATATAFASAVAKATSHARAESSAAALAKAAASSEAKSSTVTITTSEARAAAAAEASAESSASSSSEAEARSASYSGAVAKSFAESFADVIRRNDRYGSSYDSDLVSRYPSAYDDAISEALYQNTYFRGINRVAIAEAVARARAEAGAGASSSAYAESHASALVRLLQSYGVITRDIVLSVAEATATAFASAVAKATSHARAESSAAALAKAAASSEAKSSTVTITTSEARAAAAAEASAESSASSSSEAEARSASYSEAVAKSFAESFADVIRRNDRYGSSYDSDLVSRYPSAYDDAISEALYQNTYFRGINRVAIAEAVARARAEAGAGASSSAYAESHASALVRLLQSYGVITRDIVLSVAEATATAFASAVAKATSHARAESSAAALAKAAATSEAKSSTVTITTSEARAAAAARAYAESSASSSSEAEARSASYSGAVAKSYAESFADVIRRNYRYGSSYDSDLVSRYPSAYDDAITEALYQNTYFRGINRVAIAEAVARARAEAGAGASSSAYAESHASALVRLLQSYGVITRDIVLSVAEATATAFASAVAKATSHARAESSAAALAKAAASSEAKSSTVTITTSEARAAAAARASAESSASSSSEAEARSASYSGAVAKSFAESFADVIRRNDRYGSSYDSDLVSRYPSAYDDAISEALYQNTYFRGINRVAIAEAVARARAEAGAGASSSAYAESHASAMVRLLQSYGVITRDIVLSVAEATATAFASAVAKATSHARAESSAAALAKAAASSEAKSSTVTITTSEARPAAAAEASAESSASSSSEAASSSSGSSYVSAVLRSSDSRTESLFKSMLYGPFSDVISELPDMQSSESVSGISLMKEGILSSLDSDYSGFNYEKFTNSIMSLRNDISVKYPSLSARDILLYLLSCALCACFKVISEYHGINV

SEQ ID NO: 66 - DNA, 4617 bp, Poecilotheria regalis
catcatctgggagttctgacggcggcgaatggcaatattcttgttttccagctcgcaaacctgataccctctgccatgtcgtccagttactcagcggtgtctacaggaagcgcagcagcagcagcctcctcagcatcttctgccacttcgtctactacgaccacaagtaccagttcagcagctgcctcgtcttcggctgcggcatcggcgtcaacagcggattacacatcgtctctcgtttcgcttctagtcagtaatacggaattccgatcagaggtcaatgaaataacatctctttctgcggccaacgccgtctcgtatgctattgcaaaatctacagcagattatttgggcattgcaaattacacttcattagcctctgcattgtcaacctcaatctctggcgtcggcatcgggggcagtgctaactcctacgcttttgctatagcagggcctactctcaaattcctgcatcatctgggagttctaacggcggcgaatggcaatattcttgttttccagctcgcaaacctgataccctctgccatgtcgtccagttactcagcggtgtctacaggaagcgcagcagcagcagcctcctcagcatctgccacttcgtctactacgaccacaagtaccagttcagcagctgcctcgtcttcggctgcggcatcggcgtcaacagcggattacacatcgtctctcgtttcgcttctagtcagtaatacggaattccgatcaggggtcaatgaaataacatctctttctgcggccaacgccgtctcgtatgctgttgcaaaatctacagcagattatttgggcattgcaaattacacttcattagcctctgcattgtcaacctcaatctctggcgtcggcatcgggggcagtgctaactcctacgcttttgctatagcagggcctactctcaaattcctgcatcatctgggagttctaacggcggcgaatggcaatattcttgttttccagctcgcaaacctgataccctctgccatgtcgtccagttactcagcggtgtctacaggaagcgcagcagcagcagcctcctcagcatcttctgccacttcgtctactacgaccacaagtaccagttcagcagctgcctcgtcttcggctgcggcatcggcgtcaacagcggattacacatcgtctctcgtttcgcttctagtcagtaatacggaattccgatcaggggtcaatgaaataacatctctttctgcggccaacgccgtctcgtatgctattgcaaaatctacagcagattatttgggcattgcaaattacacttcattagcctctgcattgtcaacctcaatctctggcgtcggcatcgggggcagtgctaactcctacgcttttgctatagcagggcctactctcaaattcctgcatcatctgggagttctaacggcggcgaatggcaatattcttgttttccagctcgcaaacctgataccctctgccatgtcgtccagttactcagcggtgtctacaggaagcgcagcagcagcagcctcctcagcatcttctgccacttcgtctactacgaccacaagtaccagttcagcagctgcctcgtcttcggctgcggcatcggcgtcaacagcggattacacatcgtctctcgtttcgcttctagtcagtaatacggaattccgatcaggggtcaatgaaataacatctctttctgcggccaaagccgtctcgtatgctattgcaaaatctacagcagattatttgggcattgcaaattacacttcattagcctctgcattgtcaacctcaatctctggcgtcggcatcgggggcagtgctaactcctacgcttttgctatagcagggcctactctcaaattcctgcatcatctgggagttctaacggcggagaatggcaatattcttgttttccagctcgcaaacctgataccctctgccatgtcgtccagttactcagcggtgtctacaggaagcgcagcagcagcagcctcctcagcatcttctgccacttcgtctactacgaccacaagtaccagttcagcagctgcctcgtcttcggctgcggcatcggcgtcaacagcggattacacatcgtctctcgtttcgcttctagtcagtaatacggaattccgatcaggggtcaatgaaataacatctctttctgcggccaacgccgtctcgtatgctattgcaaaatctacagcagattatttgggcattgcaaattacacttcattagcctctgcattgtcaacctcaatctctggcgtcggcatcgggggcagtgctaactcctacgcttttgctatagcagggcctactctcaaattcctgcatcatctgggagttctgacggcggcgaatggcaatattcttgttttccagctcgcaaacctgataccctctgccatgtcgtccagttactcagcggtgtctacaggaagcgcagcagcagcagcctcctcagcatcttctgccacttcgtctactacgaccacaagtaccagttcagcagctgcctcgtcttcggctgcggcatcggcgtcaacagcggattacacatcgtctctcgtttcgcttctagtcagtaatacggaattccgatcagaggtcaatgaaataacatctctttctgcggccaacgccgtctcgtatgctattgcaaaatctacagcagattatttgggcattgcaaattacacttcattagcctctgcattgtcaacctcaatctctggcgtcggcatcgggggcagtgctaactcctacgcttttgctatagcagggcctactctcaaattcctgcatcatctgggagttctaacggcggcgaatggcaatattcttgttttccagctcgcaaacctgataccctctgccatgtcgtccagttactcagcggtgtctacaggaagcgcagcagcagcagcctcctcagcatctgccacttcgtctactacgaccacaagtaccagtttagcagctgcctcgtcttcggctgcggcatcggcgtcaacagcggattacacatcgtctctcgtttcgcttctagtcagtaatacggaattccgatcaggggtcaatgaaataacatctctttctgcggccaaagccgtctcgtatgctattgcaaaatctacagcagattatttgggcattgcaaattacacttcattagcctctgcattgtcaacctcaatctctggcgtcggcatcgggggcagtgctaactcctacgcttttgctatagcagggcctactctcaaattcctgcatcatctgggagttctaacggcggagaatggcaatattcttgttttccagctcgcaaacctgataccctctgccatgtcgtccagttactcagcggtgtctacaggaagcgcagcagcagcagcctcctcagcatcttctgccacttcgtctactacgaccacaagtaccagttcagcagctgcctcgtcgtcggctgcggcatcggcgtcaacagcggattacacatcgtctctcgtttcgcttctagtcagtaatacggaattccgatcaggggtcaatgaaataacatctctttctgtggccaacgccgtctcgtatgctattgcaaaatctacagcagattatttgggcattgcaaattacacttcattagcctctgcattgtcaacctcaatctctggcgtcggcatcgggggcagtgctaactcctacgcttttgctatagcagggcctactctcaaattcctgcatcatctgggagttctgacggcggcgaatggcaatattcttgttttccagctcgcaaacctgataccctctgccatgtcgtccagttactcagcggtgtctacaggaagcgcagcagcagcagcctcctcagcatcttctgccacttcgtctactacgaccacaagtaccagttcagcagctgcctcgtcttcggctgcagcagtaggaaccttaccagccgcattcggaagtgatctatcgggtttgacttctgtggtgtctgcgccttcagggtacagtgtaggtggtgtgccttggagcagtggtttttcttttgaaacatctgttttgctgtctcctgtttcggtggaaaggatgtctgctatctgtcccattgttgctcgtgcgatttttcccggcggtttagacgatgttgctttcggtgacgtcctgcattatatggtgacgcaaatttcaagtagtggtgttaggtcatcagagtctgaagttgttattgaagctctgcttgaaatgctgaccgttcttctggcaatattatcttcgtccactgttgtgcaaccgattgcaccatctggcgcgtatgcgagctctgtagctcaagctgtttcatacgcgttctcgggaagtgggtgatttttgtttatgtgtaatttcgatgttgctatgtgcatttccaagaatgaaataggattttaatgtttcttttgtagtcgtggtctcttactgttgtaccttattaattgtcctttagtaatgctgtagtttttttttctctctctttaagatggtgaaggtattacactaccaaagacgttttattgtggaataaagaagcatatctcaaaaaaaaaa

SEQ ID NO: 67 - protein, 1464 aa, Poecilotheria regalis
HHLGVLTAANGNILVFQLANLIPSAMSSSYSAVSTGSAAAAASSASSATSSTTTTSTSSAAASSSAAASASTADYTSSLVSLLVSNTEFRSEVNEITSLSAANAVSYAIAKSTADYLGIANYTSLASALSTSISGVGIGGSANSYAFAIAGPTLKFLHHLGVLTAANGNILVFQLANLIPSAMSSSYSAVSTGSAAAAASSASATSSTTTTSTSSAAASSSAAASASTADYTSSLVSLLVSNTEFRSGVNEITSLSAANAVSYAVAKSTADYLGIANYTSLASALSTSISGVGIGGSANSYAFAIAGPTLKFLHHLGVLTAANGNILVFQLANLIPSAMSSSYSAVSTGSAAAAASSASSATSSTTTTSTSSAAASSSAAASASTADYTSSLVSLLVSNTEFRSGVNEITSLSAANAVSYAIAKSTADYLGIANYTSLASALSTSISGVGIGGSANSYAFAIAGPTLKFLHHLGVLTAANGNILVFQLANLIPSAMSSSYSAVSTGSAAAAASSASSATSSTTTTSTSSAAASSSAAASASTADYTSSLVSLLVSNTEFRSGVNEITSLSAAKAVSYAIAKSTADYLGIANYTSLASALSTSISGVGIGGSANSYAFAIAGPTLKFLHHLGVLTAENGNILVFQLANLIPSAMSSSYSAVSTGSAAAAASSASSATSSTTTTSTSSAAASSSAAASASTADYTSSLVSLLVSNTEFRSGVNEITSLSAANAVSYAIAKSTADYLGIANYTSLASALSTSISGVGIGGSANSYAFAIAGPTLKFLHHLGVLTAANGNILVFQLANLIPSAMSSSYSAVSTGSAAAAASSASSATSSTTTTSTSSAAASSSAAASASTADYTSSLVSLLVSNTEFRSEVNEITSLSAANAVSYAIAKSTADYLGIANYTSLASALSTSISGVGIGGSANSYAFAIAGPTLKFLHHLGVLTAANGNILVFQLANLIPSAMSSSYSAVSTGSAAAAASSASATSSTTTTSTSLAAASSSAAASASTADYTSSLVSLLVSNTEFRSGVNEITSLSAAKAVSYAIAKSTADYLGIANYTSLASALSTSISGVGIGGSANSYAFAIAGPTLKFLHHLGVLTAENGNILVFQLANLIPSAMSSSYSAVSTGSAAAAASSASSATSSTTTTSTSSAAASSSAAASASTADYTSSLVSLLVSNTEFRSGVNEITSLSVANAVSYAIAKSTADYLGIANYTSLASALSTSISGVGIGGSANSYAFAIAGPTLKFLHHLGVLTAANGNILVFQLANLIPSAMSSSYSAVSTGSAAAAASSASSATSSTTTTSTSSAAASSSAAAVGTLPAAFGSDLSGLTSVVSAPSGYSVGGVPWSSGFSFETSVLLSPVSVERMSAICPIVARAIFPGGLDDVAFGDVLHYMVTQISSSGVRSSESEVVIEALLEMLTVLLAILSSSTVVQPIAPSGAYASSVAQAVSYAFSGS

SEQ ID NO: 68 - DNA, 893 bp, Poecilotheria regalis
  CDS (1)..(717)
gcttatgcgtctgcaatctctcagtctctctccagtttaggaatactaaattcaggaaacgccattgctcttgcaaacgcattcacaagtggtgcatcctctaacgcgtcgtccgcggccgccgcagcttcaaccgtattagctggagttgctcctgccggttcatctgcaagcagttcagcagcatcagcctccaccggagccggagctgcaatcagttctgtcgggccagcagttggtttcggtgctggcccagcacctgctggtggtttggtctcaggtttacctggctacagtcccttaaaccaaggctttactccatatcccggagttcccctcccgacaggttctggtgtctctgctcctgttcccgtttcgcctttgcccttaggtcttttaccatcttctttagatttatcgtcaccttctgcaactggaagaatgtcgtctatggtacgatctcttttgtccgcagtttcttccggcggtttgaattcctccctgcttggaagcaccttgacttccttggtatcccagatttcttcaagtcgcagcgatctgtcggcctcacaggtcttagttgaagctgttcttgagattttatctgctgttattcagatcctttcgtctgctacaattggagttgtgagtaccgattcagtaggtgcgacatctagtgctgttgctcaagctgtgtcctctgcttttgctggataacgatttgatatccatgtgctgtgttaaatttgttttcaaagaaaattcttgtgtcattatcaatctgtcaattatttttgttttttgaaaattgtaattttttgtttgatattcctgtctgtgtttgtaagggcaagggttgtaatttgtaaccaaacttgcatacggaataaaag

SEQ ID NO: 69 - protein, 238 aa, Poecilotheria regalis
AYASAISQSLSSLGILNSGNAIALANAFTSGASSNASSAAAAASTVLAGVAPAGSSASSSAASASTGAGAAISSVGPAVGFGAGPAPAGGLVSGLPGYSPLNQGFTPYPGVPLPTGSGVSAPVPVSPLPLGLLPSSLDLSSPSATGRMSSMVRSLLSAVSSGGLNSSLLGSTLTSLVSQISSSRSDLSASQVLVEAVLEILSAVIQILSSATIGVVSTDSVGATSSAVAQAVSSAFAG

SEQ ID NO: 70 - DNA, 2460 bp, Sphodros rufipes
  CDS (3)..(2330)
cggtatatgcctgtgccaacgcatcaagtgcttctgccattgcatatgccatcgcatttgcatttgcgcaagctttagtcagctcaagcttcgctaccgcatcgagctttaggtcgatttccacagcatttgctcaggctctcgtttcagctgttgcctcttctgccgcatctgctacatctgcagcagcggcggcgtccgcagctgcttccgcctcgggagccgccgccgcagccgcaggcgctgcaggcgcagctgccggatcttctacgagcactacaacgacaactgccgctgcgagtgcagccgcttcatctgcttctgctgctgccgccggctccgccgcttcgtctgcagccgccgcccgtgcttcagcgtccgctacgtcggtttcgcaaactgtgtcctcattcttagttcagtcatcacgattccaatccgcagtttcaagcttgtatgcgttaggtactgacgcctactcttccgcctacgccgatgcagcggctcgagctattagtggagccggatttagttcagctgaggcttcggcattcgccagcagtgtatacaacgcggtatatgcctgtgccaacgcatcaagtgcttctgccattgcatatgccatcgcatttgcatttgcgcaagctttagtcagctcaagcttcgctaccgcatcgagctttaggtcgatttccacagcatttgctcaggctctcgtttcagctgttgcctcttctgccgcatctgctacatctgcagcagcggcagcgtccgcagctgcttccgcctcgggagcctctgccgcagccgcaggcgctgcaggcgcagctgccggatcttctacgagctctacaacgacaactgccgctgcgagtgcagccgcttcatctgcttctgctgctgccgccggctccgccgcttcgtctgcagccgccgcccgtgcttcagcgtccgctacgtcggtttcgcaaactgtgtcctcattcttagttcagtcatcacgattccaatccgcagtttcaagcttgtatgcgttaggtactgacgcctactcttccgcctacgccgatgcagcggctcgagctattagtggagccggatttagttcagctgaggcttcggcattcgccagcagtgtatacaacgcggtatatgcctgtgccaacgcatcaagtgcttctgccattgcatatgccatcgcatttgcatttgcgcaagctttagtcagctcaagcttcgctaccgcatcgagctttaggtcgatttccacagcatttgctcaggctctcgtttcagctgttgcctcttctgccgcatctgctacatctgcagcagcggcagcgtccgcagctgcttccgcctcgggagccgccgccgtagccgcagccgctgcaggcgcagctgccggatcttctacgagcactacaacgacaactgccgctgcgggtgcagccgcttcatctgcttctgctgctgccgccggctccgccgcttcgtctgcagccgccgcccgtgcttcagcgtccgctacgtcggtttcgcaaactgtgtcctcattcttagttcagtcatcacgattccaatccgcagtttcaagcttgtatgcgttaggtactgacgcctactcttccgcctacgccgatgcagcggctcgagctattagtggagccggatttagttcagctgaggcttcggcattcgccagcagtgtatacaacgcggtatatgcatgtgccaacgcatcaagtgcttctgccattgcatatgccatcgcatttgcatttgcgcaagctttagtcagctcaagcttcgctaccgcatcgagctttaggtcgatttccacagcatttgctcaggctctcgtttcagctgttgcctcttctgccgcatctgctagatctgcagcagcggcagcgtccggagctgcttccgcctctggagccgcagccgttgcagtcgcgtctggcggagctggtacggtaactgcagcttctagcgtttccgcttccgccgcttctgttgcagttaattctggattgagtggtgtgttgtcttcaccatctggaattttgtcagaatatgcaagcaatcgtatttctggatttgtatcatcaattcgttcaggaggaccgtcggcttcattgttttttgaaaacctatctttactgtcgtcaagtatttcttcgggatattcggatctatcagcacatgaagtgattattgaaatcttgatggagtgtctaatagcaatggttcaatttgcatattctagcgataatttgtctcatgcgtcggtagctaaggctattgttaatgcctttgctaattaatatttcttgggttacttgaatttaaactgaatgtaaggtagatggaatgtctaattattatattcgtatgtattttccagtcaaataagaattatacttctttgctcaaataaatttttgaaatgtaaaa

SEQ ID NO: 71 - protein, 775 aa, Sphodros rufipes
VYACANASSASAIAYAIAFAFAQALVSSSFATASSFRSISTAFAQALVSAVASSAASATSAAAAASAAASASGAAAAAAGAAGAAAGSSTSTTTTTAAASAAASSASAAAAGSAASSAAAARASASATSVSQTVSSFLVQSSRFQSAVSSLYALGTDAYSSAYADAAARAISGAGFSSAEASAFASSVYNAVYACANASSASAIAYAIAFAFAQALVSSSFATASSFRSISTAFAQALVSAVASSAASATSAAAAASAAASASGASAAAAGAAGAAAGSSTSSTTTTAAASAAASSASAAAAGSAASSAAAARASASATSVSQTVSSFLVQSSRFQSAVSSLYALGTDAYSSAYADAAARAISGAGFSSAEASAFASSVYNAVYACANASSASAIAYAIAFAFAQALVSSSFATASSFRSISTAFAQALVSAVASSAASATSAAAAASAAASASGAAAVAAAAAGAAAGSSTSTTTTTAAAGAAASSASAAAAGSAASSAAAARASASATSVSQTVSSFLVQSSRFQSAVSSLYALGTDAYSSAYADAAARAISGAGFSSAEASAFASSVYNAVYACANASSASAIAYAIAFAFAQALVSSSFATASSFRSISTAFAQALVSAVASSAASARSAAAAASGAASASGAAAVAVASGGAGTVTAASSVSASAASVAVNSGLSGVLSSPSGILSEYASNRISGFVSSIRSGGPSASLFFENLSLLSSSISSGYSDLSAHEVIIEILMECLIAMVQFAYSSDNLSHASVAKAIVNAFAN

SEQ ID NO: 72 - DNA, 5379 bp, Latrodectus geometricus
  CDS (1)..(5379)
gctggagtattgtctcgttcccagatggatgatatctcatctattagcgataccataatatctgccattgagagaaatccaaataattccagatcgaaactgcaagctttaaacatggccttcgcatcttcagtttcggaaattgccttctctgagagcaatggcatttcgaacggtgctaaaatacaagcgattattgatgcattgagaggagcctttttgcaaactattggtactgttgatcaaacctttttgaatgaaattgcaagtctcgttaaaatgttttctcaagtatcagcagaaaatgaagtttctgcaagtgcaggagcagccgctactactggtggaaccagtactggtggttacggccaacaaggtggtgggtataatcaaggttcaactgcattatcaacttcttctgcaggagcaagaacctcaataggcacaactgggtattctgcggggtcaacacaaacatcttctgctgtatcctctacaagccaaatggcgcaatcagcaacagcacaatccgggcaatacggtcaacctagtgttggaccaggaggatatggttcaggggcaggaggctatggacaagctacaagggttacagcaggtgcgactgctggagcaggaggatacggtcaagccgatggagtctatggagcaaatcctagaggtgcaccacaaggatatggaccaggtgctggccctgcagcaggtgcggattctggttcagtagcaggagggtatggaccaagtcaaggaggcagtgcatcctcttccgcagcagcagcagcagcttctgctggttatacgcaaaggcaaaatgaagttatcactacagtttctactacacgccaagaaactgcagattatggtcaaaaacaggcttcaggtgcctcagcagtatcaacttcaagtgcgggtagttacgctcaaggtcctagaggctatggtccagggcaaggtgctggtgcgactgcaggtgctggagcaggaggatacagtcaaggctccggaagttatggacaaggtgttagtactgcagtcggtgcggtagctagagctggagcaggaagttatggtccaggctctggaccctatggatcaggtgctatcgatgcgtcaggaggatatggaccaggtgctggtactgcagcaggtgcatctgctagtgctggagcaggtgcaacaactggtgttcgaccaggaggatacggtcaaggttcaggaggctatggacaagctgcgggtcctggggcaggaggctatggacaaggtactggtgctgcagcaggtgcaggaactgatgctggaataggaggatacggtcaaggcgcaggaggctttggacaaggtggtgctgcagcaggtgcagcaactggtgcgggaccaggaggatatggtctaggtgcaggaggctatggacaacctataggggctacagcaggtgcgactgctggagcaggaggatacggtcaaggcgctggagtctctggagcaggttctagaggtgcaccagcaggatatggaccaggtgctggccctgcagcaggcgcgacctctggtgcagtagcaggaggaaaaggcccaggagggtatgggccaagtcaagtagccagtgcatcctcttctgcagcagcagcagctgctagtggttatacgcaaaagcaaaatgaagttatcactacagtttccactacacgccaaaaaattgcagactatggacaaaaacaggcttcaggcgcctcagcagcagtatcaacttcaagtgctggtggttacgctcaaggtcctggaggctatggtccagggaaaggtgctggtgcgactacaggtgctggagcaagaggatacagtcaaggccccggaggttatgcacaaggtgttagtactgcagccggtgcagctatagctggagcaggaggttatggtccatccacgggaccctatggacaaggtgctatagatgcgtcaggaggatatggacaaggtgttggtactgcagcaggtgcatccgctagtgctggatcaggtgcagccactggtgttggaccagtaggatacggtcaaggtttaggaggctatggacaagctgttggtcaaggagcaggtggttatggacaaggtgctggtgctgcaacagttaccgtaactgctgctgtgccaggaggatatggtccaggggcaggaggctatgggcaaggtgttggtgctgcagcaggtgcaggaactgatgctggaataggaggatacggtcaaggcgcaggaggctttggacaaggtggtgctgcagcaagtgcagcaactggtgcgggaccaggaggatatggtctaggtgcaggaggctatggacaacctataggggctacagcaggtgcgactgctggagcaggaggatacggtcaaggcgctggagtctctggagcaggttctagaggtgcaccagcaggatatggaccaggtgctggccctgcagcaggcgcgacctctggtgcagtagcaggaggaaaaggcccaggagggtatgggccaagtcaagtagccagtgcatcctcttctgcagcagcagcagctgctagtggttatacgcaaaagcaaaatgaagttatcactacagtttccactacacgccaaaaaattgcagactatggacaaaaacaggcttcaggcgcctcagcagcagtatcaacttcaagtgctggtggttacgctcaaggtcctggaggctatggtccaggtcaaggtgctggtgcgactgcaggtgctggagcaagaggatacagtcaaggtcccggaggttatgtacaaggtgttagtactgcagccggtgcggcagctagagctggagcaggaggttatggcccaggtgctggtccctatgttcaaggtgctatagatgcgtcaggaggatatggacaaggtgctggtactgcagcaggtgcatctgctagtgctggatcaggggcagcaactagtgttgggccaggaggatacggtcaaggtttaggaggctatggacaagctgccggtcaaggagcaggaggttatggacaaggttctggttctgcagcaggtgcgtccgctagtgctggagcaggtgcagcaactggtgttggaccaggaggatacggtcaaggtacaggaggctatggacaaggtgttggtgctgcagcaggtgcagcaactggtgtgactgctggagcaagaggatacgatcaagccgctggagtctctggagcaggtcttagaggtgcaccaggaggatatggaccaggtgctggcatttcagcaggtgcggcctctggtgcagtagcaggaggaaaaggtccaggagggtatgggccgagtcaagtagccactgcatcctcttctgcagcagcagcagcagctgctagtggttacacgcaaaggcaaaatgaagttatcactacagtttctactacacgccaaaaaactgcagactatggtcaaaaacaggcttcaggtgcatcagcagcagtatcatcttcaagtgccggtggttacactcaaggtcctggaggctatggtccagggcaaggtgttgtagcaggaggttatggcccaggtgctggatcctatggaccaggtgctatagatgcatcaggaggatatggacaaggtgctggtactgcagcaggtgcgtccgctagtgctggagcaggtgcagcaactggtgttggaccaggaggatatggtcaaggtttaggaggctatggacaagctgccggtcaaggagcaggaggttatggacaaggtgctggtactgcagcaggtgcgtccgctagtgctggagcaggtgcagcaactggtgttggaccaggaggatacggtcaagttacaggaggctatggacaagctacgggggctgcaataggcgcgacagctggtactggagcaggaatatacggtcaaggcgcaggaggctatagacaaggcgttggtgctgcagcaggtgcagcaactggtgtgactgctggagcaggaggatacggtcaagccgctggagtctctggagcaggtcttagaggtgcaccaggaggatatggaccaggtgctggcatttcagcaggtgcggcctctggtgcagtagcaggaggaaaaggtccaggagggtatgggccaagtcaagtagccactgcatcctcttctgcagcagcagcagcagctgctagtggttatacgcaaaggcaaaatgaagttatcactacagtctctactacacgccaaaaaactgcagactatggtcaaaaacaggtttcaggtgcatcagcagcagtatcaacttcaagtgctggtggttacactcaaggtcctggaggctatggtccagggcaaggtgctgtagcaggaggttatggcccaggtgctggatcctatggagcaggtgctatagatgcatcaggaggatatggacaaggtgctggtactgcagcaggtgcgtccgctagtgctggagcaggtgcagcaactggtgttggaccaggaggatacggtcaaggtttaggaggctatggacaatctgcaggtcaaggagcaggaggttatagacaaggtgctggtactgcagcaggtgcgtccgctagtgctggagcaggtgcagcaactggtgttggaccaggaggatacggtcaaggtttagggggctatggacaagctgcaggtcaaggagcaggaggttatggacaaggtgctggtactgcaacaagcacagcaactggtgcgggaacaggaggatatggtcgattggcaggaggatatggtcaaggggcaggaggttatggacaagcggctgctggggctgcagcagacgcgactgctggtgctggagggtatgatcgagccactggagcctttggaccaagtactagacgtgcagcaggaggatctgggctaggtgctggtactgcaccaggtgcattctctggttctggagcaggaggaaaaggtcctggagactacggatccagtcaaggagccagtgcatcctcttctgcagcagcagctgctagtggttatatacaaaaacaaaatgaagttatcactacagtttctactacacgccaagaaactgcagattatggtcgaaaacagggttcaggtgcctcggcagccgcatcaacttcaagtgcaggtggttatgttcaaggctctggaggcagtggtccagttcaaggtcctggaggctatggagcaggacaaggtgccggagtctatggagtagggaaaggtgctgctgcggctgtaagtgctggagcagggtctgctgggtatggacaaatgcaaactgtaggagctgtaagtggtacaacgactgtgtcttctgcagcatcacgattgagttctgctgcttcc

SEQ ID NO: 73 - protein, 1793 aa, Latrodectus geometricus
AGVLSRSQMDDISSISDTIISAIERNPNNSRSKLQALNMAFASSVSEIAFSESNGISNGAKIQAIIDALRGAFLQTIGTVDQTFLNEIASLVKMFSQVSAENEVSASAGAAATTGGTSTGGYGQQGGGYNQGSTALSTSSAGARTSIGTTGYSAGSTQTSSAVSSTSQMAQSATAQSGQYGQPSVGPGGYGSGAGGYGQATRVTAGATAGAGGYGQADGVYGANPRGAPQGYGPGAGPAAGADSGSVAGGYGPSQGGSASSSAAAAAASAGYTQRQNEVITTVSTTRQETADYGQKQASGASAVSTSSAGSYAQGPRGYGPGQGAGATAGAGAGGYSQGSGSYGQGVSTAVGAVARAGAGSYGPGSGPYGSGAIDASGGYGPGAGTAAGASASAGAGATTGVRPGGYGQGSGGYGQAAGPGAGGYGQGTGAAAGAGTDAGIGGYGQGAGGFGQGGAAAGAATGAGPGGYGLGAGGYGQPIGATAGATAGAGGYGQGAGVSGAGSRGAPAGYGPGAGPAAGATSGAVAGGKGPGGYGPSQVASASSSAAAAAASGYTQKQNEVITTVSTTRQKIADYGQKQASGASAAVSTSSAGGYAQGPGGYGPGKGAGATTGAGARGYSQGPGGYAQGVSTAAGAAIAGAGGYGPSTGPYGQGAIDASGGYGQGVGTAAGASASAGSGAATGVGPVGYGQGLGGYGQAVGQGAGGYGQGAGAATVTVTAAVPGGYGPGAGGYGQGVGAAAGAGTDAGIGGYGQGAGGFGQGGAAASAATGAGPGGYGLGAGGYGQPIGATAGATAGAGGYGQGAGVSGAGSRGAPAGYGPGAGPAAGATSGAVAGGKGPGGYGPSQVASASSSAAAAAASGYTQKQNEVITTVSTTRQKIADYGQKQASGASAAVSTSSAGGYAQGPGGYGPGQGAGATAGAGARGYSQGPGGYVQGVSTAAGAAARAGAGGYGPGAGPYVQGAIDASGGYGQGAGTAAGASASAGSGAATSVGPGGYGQGLGGYGQAAGQGAGGYGQGSGSAAGASASAGAGAATGVGPGGYGQGTGGYGQGVGAAAGAATGVTAGARGYDQAAGVSGAGLRGAPGGYGPGAGISAGAASGAVAGGKGPGGYGPSQVATASSSAAAAAAASGYTQRQNEVITTVSTTRQKTADYGQKQASGASAAVSSSSAGGYTQGPGGYGPGQGVVAGGYGPGAGSYGPGAIDASGGYGQGAGTAAGASASAGAGAATGVGPGGYGQGLGGYGQAAGQGAGGYGQGAGTAAGASASAGAGAATGVGPGGYGQVTGGYGQATGAAIGATAGTGAGIYGQGAGGYRQGVGAAAGAATGVTAGAGGYGQAAGVSGAGLRGAPGGYGPGAGISAGAASGAVAGGKGPGGYGPSQVATASSSAAAAAAASGYTQRQNEVITTVSTTRQKTADYGQKQVSGASAAVSTSSAGGYTQGPGGYGPGQGAVAGGYGPGAGSYGAGAIDASGGYGQGAGTAAGASASAGAGAATGVGPGGYGQGLGGYGQSAGQGAGGYRQGAGTAAGASASAGAGAATGVGPGGYGQGLGGYGQAAGQGAGGYGQGAGTATSTATGAGTGGYGRLAGGYGQGAGGYGQAAAGAAADATAGAGGYDRATGAFGPSTRRAAGGSGLGAGTAPGAFSGSGAGGKGPGDYGSSQGASASSSAAAAASGYIQKQNEVITTVSTTRQETADYGRKQGSGASAAASTSSAGGYVQGSGGSGPVQGPGGYGAGQGAGVYGVGKGAAAAVSAGAGSAGYGQMQTVGAVSGTTTVSSAASRLSSAAS

SEQ ID NO: 74 - DNA, 2626 bp, Latrodectus geometricus
  CDS (3)..(2624)
gcttcgtctctttagatgccgcaagtgtatgggacagcactgctaaagctgaagctttcattggaagcttcaactctggcatggaaagatctggagtattgtctcgttcccagatggaagatatcgcatccataagtgatactataatatctgccattgagagaaatccaaataattcaagatcgaaactgcaagctttaaacatggctttcgcatcttcagtttcggaaattgctttctctgagaacaatggaatttcaaacggtgctaaaatacaagcgattattgatgcattgagaggagcctttttgcaaactattggtactgttgatcaaacctttttgaatgaaattgcaagtctcgttaaaatgttttctcaagtatcagcagaaaatgaagtttctgcaagtgcaggagcagccgctactacgggtggagccagtgctggtggttacggccaacaaagtggtgggtacaatcaaggttcagctgtgtcaacatcttcagcagcaggagcaatgacctatgcaggaaatactggatattctgctggttcaacacaagtatcttccagtgaaacttctacaagtcaatctgcgcagtcagcaaccgcaaccagtgcgcaatacggccaagcacaaagtgcaggagcatacggtcaagggtctggatcagcagcaggagcagctgctggcgcagtaggctacggacaaggtgcaggtgctggagcaggaggatatggccaaggtgctgctgctggagcaggtgcggcagctggtgctggagcaggaggctacggacaaggtgcaggtgctggagcaggaggatatggccaaggtgctggaggctacggacaaggtgctggtgcaggtgcggcagctggcgctggatcaggaggatatggccaagctgctggtgctggggcaggtgcggcagctggtgctggagcaggaggctacggacaaggtgcaggtgcaggagcacaaggatatggccaaggtgctggaggctacggacaaggtgctggtgctggagcaggaggatatggccaaggtgctggaggctatttacaaggcgctggtgcaggagcaagtggggctgctggcgctggagcaggaggatatggtcaaggtgctggaggctatggacaaggtgcaggtgctggagcaggtgcggctgctggtgctggagcaggaggatatggccaaggggctgcaggatacggacaaggtgctggtgctggggcaagtgtggcagctggtgctggagcaggaggatatggccaaggtgctggagcaggcgctggagccggagcagctgctgctgccggtgcaggaggatatggtcaaggagcaggaggctatggacgaggacaaggtgctggtgcatcagctggtgcaggtgcaggtgctggagcaggaggatatggccaaggtgctggagcaggcgctggagcaggtgctggtgcaggagcaggcgctgctgctggagctggaggatacggtcaaggagcaggaggctctggtcgaggacaaggtgctggtgctgcagctagtgctgctgctggtgctggagcaggaggatatggccaagctgcaggaacaggtgctggtgcaagagcaggtgctgctgctggagcaggaggattcggtcaaggagcaggaggctatggacgaggacaaggtgctggtgcatcagctggtgctggagcaggagcaggaggatatggccaaggtgctggagcaggcgctggagcaggtgctggtgctggtgcaggagcaggcgctgctgctggagctggaggatacggtcaaggagcaggaggctatggacaaggacaaggtgctggtgctggagcgggaggatatggccaaggagcgggatcaggtgcgggtgcagcagcaggagctggtgctggagcaggaggatatggtcaaggtgcgggagcaggaggatacggccaaggagcgggagcaggtgctggtgcagcagcaggagctggcgctttagcaggaggatacggccaaggagccggaggttctggacgaggacaaggtgctggagcaggagcaggtgcggctgctagcgcagcagcaggtgggtatggcagaggtgttggaggctatggtcaaggtgcaggagctggaggatatggtcgaggtgctggttctgcaggaggcgctgctgcaggagctgctgcatcaggaggatatggacaggcacaaattgcacaatcggcaagtacttcagctactggagcatcatcttccggttacacagcccaacaagcttttggaacatcttcagctgtttcaacatcaagcgctagtgggtattctcaagcaagtggaggctatggtcaaagtgcaactggtcaatcctatgcaggttatggacaaagtgttggagctgtaagtggcacaagtgcatcagcgactgcttcttctgcagcatcacgattgagttctgctgcttcctcttctagaataagttctgcagcgtcaagcctagccactgggggagctttgaatactgctgcattgccttcggtagtttctaatattatgtcccaagtttctgctagtagtcctggagtctcttcgagtgaagttgttatccaagccct

SEQ ID NO: 75 - protein, 874 aa, Latrodectus geometricus
FVSLDAASVWDSTAKAEAFIGSFNSGMERSGVLSRSQMEDIASISDTIISAIERNPNNSRSKLQALNMAFASSVSEIAFSENNGISNGAKIQAIIDALRGAFLQTIGTVDQTFLNEIASLVKMFSQVSAENEVSASAGAAATTGGASAGGYGQQSGGYNQGSAVSTSSAAGAMTYAGNTGYSAGSTQVSSSETSTSQSAQSATATSAQYGQAQSAGAYGQGSGSAAGAAAGAVGYGQGAGAGAGGYGQGAAAGAGAAAGAGAGGYGQGAGAGAGGYGQGAGGYGQGAGAGAAAGAGSGGYGQAAGAGAGAAAGAGAGGYGQGAGAGAQGYGQGAGGYGQGAGAGAGGYGQGAGGYLQGAGAGASGAAGAGAGGYGQGAGGYGQGAGAGAGAAAGAGAGGYGQGAAGYGQGAGAGASVAAGAGAGGYGQGAGAGAGAGAAAAAGAGGYGQGAGGYGRGQGAGASAGAGAGAGAGGYGQGAGAGAGAGAGAGAGAAAGAGGYGQGAGGSGRGQGAGAAASAAAGAGAGGYGQAAGTGAGARAGAAAGAGGFGQGAGGYGRGQGAGASAGAGAGAGGYGQGAGAGAGAGAGAGAGAGAAAGAGGYGQGAGGYGQGQGAGAGAGGYGQGAGSGAGAAAGAGAGAGGYGQGAGAGGYGQGAGAGAGAAAGAGALAGGYGQGAGGSGRGQGAGAGAGAAASAAAGGYGRGVGGYGQGAGAGGYGRGAGSAGGAAAGAAASGGYGQAQIAQSASTSATGASSSGYTAQQAFGTSSAVSTSSASGYSQASGGYGQSATGQSYAGYGQSVGAVSGTSASATASSAASRLSSAASSSRISSAASSLATGGALNTAALPSVVSNIMSQVSASSPGVSSSEVVIQA

SEQ ID NO: 76 - DNA, 6379 bp, Latrodectus tredicimguttatus
  CDS (1)..(6378)
gagagaaacccaaacaactcgaaatcgaaactgcaagctttaaacatggcttttgcatcatcagtttcggaaattgcgttctctgagaacaatggaatttcaaacagtgctaaaatacaagcgattattgatgcactgagaggagcatttcttcaaactattggtacggttgatcaaacctttttgaatgaaatttctagtctagttaaaatgttttcacaggtctcagcagaaaatgcagtttcaacaagtgctggagcagcagctaccagtgttggtggttacggagaacaaactgctgggtatagtcaaggttcagctgcgtccgcctcatctttggcagcagcaaaaaccactgcaggcactactggatattctgctggttcaacacaagtctcttcttttgtaacttctacaagccaagctgcgcaatcagcaacagcaaccagtcagtatggccaagcacaaattgccggatcatatagtaacgcggctgctggagctacaggtgcttatgcgggaggatacggtcagggtgctggtgctgcaggtggcgcgggtgcaggtgatggaacaggaggatatggccaaggcgcaggaggctatggacaaggtgctggtgctgcagcaggtgccggtgctggcgcaggagctggaggatatggccaaggttctggaggctacggacaaggtgctagtgctgcagctggtgcggctgctggtgcaggagcaggcggatatggtcaaggtgctggttcagcagcaggtgcgtatgctggtgtaggaggctatggacaaggtgatggtgctgtagcaggtgcggctgctggagcaggaggatatggttcaggttctcaaggctacggacaaggtgctgctgcaacctcgtcggctgcagcaggagcatcttccactggctatactgaaagacaaaatgaagttgtcactacagttactactacacgacaggaaactgcagatcgaagacaggcagcaagggcttctgcagcagctggatacggtcaaggtgctggaggcaatggacaaggtcctagtgcagctgcaggagctagaagatatggtcaaggtgctggtggctatggacaaggtgctggttctgcagcaggtgcggctgctggtgctggttcaggaggatatggtcaaggtgcaagaggctatggacaaagtgctggtgctgcagctggaacaggatcttatggccaaggtgctggtgttgcagctggtgcggctgctggcgcaggagcaggaggtaatggccaaggttctggaggatacggacaaggtgttagtgctgcagctggtggggctgctggtgcaggagcaggtggatatggccaagttgccggaggctacggacaaggtgctggttttgcagcaggctcggctgctgttgcaggagcaggcggttatggtcaaggtgctggttctgcagcaggtgctggaacaggtactgttgcaggaggatatggtcaaggtgctgtaggctatggacaaggtgttgctgctgcagcaggtgcggctgctggagcagaaagatatggtccaggttatcaaggctacggacaaggtgctgctgcaacctcgtcggctgcagcaggagcatcttcaactggctatacagaaagacaaaatgaagttgtcacttcagttacttctacacgacaggaaactgcagatcgaaggcaggcagcaagggcttctgcagcaactggctacggcccaggcgctggaggctatggacaaggtcctagtgcagtagcaggagctggaggatatggtcaaggtactggtggctatggacaaggtgttggttctgcagcaggtgcggctgctggtgcaggagcaggaggatatggtcaagataatggtgctgcagcaggtgcaggtactggtgcaagaggatatggtcaaggttctggaggttatggacagggtgcgggtactgcagcaggatcaggagctaatggccaaggtgctggaggctacgcactaggtgctggtgcaggagcaggcggatatggccaaggtgcaggaggctacggacaaggtgcaggaggctatgtacaaggtgctagtgctgctgttgtttcggctgctggtgcaggagcaggaggatatagtcaaggtgctggaggctacgggcaaggtgctggaggctatggacaaggtgctggaggctatggacaacgtgctggaggctatggacaaggtgtagttgatgcagcaggttatggtccaggttctcaaggttacggacaaagtgctgctgcaacttcgtcggcttcagcaggagtatcttccactggctatacagaaagacaaaatgaagttatcactacagttactactacacgacaggaaactgcagatcaaagacaggcagcaagggcttcagctgcagtatcaactgcagctgcagctggctacggccaaggtactaaaggctatgggcaaggtcctggagcagcagcaggatctggaggatacggtcaaggtgctggtggctatggacaaggagctgcagtaggttcagctgcaggatctgaagtagcgggataccgtcaaggggctggtggctatggacaaggagttggtgctgcagcaagtgcggctgctggtgcaggagcaggcggatatggccaaggtgccggaggctacgttcaaggtgctggtcttgcagcaggtgcggctgctggtgcaggagcaggaggatatggtcaaggtgcaaggagctatggacaaggtgctggttctgcagcaggtgcggctgctgctgctacaggagcaggtggatatggccaaggtgccggacgctacacacaaggtgctggttttgcagcaggtgcggctgctggtgcagcagcaggaggatatggtaaagatgctggtgctgcagcaggtgcaggtactggtgcaggaggatatggtcaaggttctggaggctatggacagaatgcgggtgctgcagcaggatcaggagctaatggccaaggtgctggaggctacggacaaggtgctgcagctgttgcggctgctggtgcaggagcaggcggatatggccaaggtgcaggaggctatggacaagatgctggaggttatggacaaggtgctggaggcaatgggcaaggtgtagttgatgcagcaggatatggtccaggttctcaaggttacggacaaagtgctgctgcaacctcgtcggctgctgcaggagcatctgctactggctatacagaaagacaaaatgaagttgtcactacagttactactacacgacaggaaactgcagatcgaagacaggcagcaagggcttcagcagcagtatcaacttcagctgcagctggctacggccaaggtactagaggctatgggcaagttcctggagcagcagcaggagctggaggatacggtcaaggtgctggtggctatggacaaggagctgcagtaggttcatctgcaggatctggagtagcgggatacggtcaaggttctggtggctatggacaaggtgctgctgctgcagcaggagcaggcgcttatggccaaggtgctggaggctacggacaaggtgctggtgcggctactggctcaggagcaggaggatatggccaaggtgcagggggctatggacaagatgctggtgctgcagcaggagcttatggccaaggtgctggtggctacggacaaggtgcggcatctggtgtggctactggcacaggagcaggaggatatggccaaggtgctggaggctatggacaaggtgctagtgctacagctgttgcggctgctggtgcacgagcaggaattattggccaaggtgcaggagtctatggacaaggtgctgtttctgcagcaggggcggctggtgatacaggggcaggcggatatggtcaaagtactggaggctatggaccaggttttggtgctgtagcaggtgcggctgctggagcaggtggatatggtccaggttcacaaggctacggacaaggtgctacctcaacctcctcggctgcagcaggagcatcttccactggctatacagaaagacaaaatgaggtcgttactacagttacttctacacgacaggaaactgcagatcgaagacaggcagcaagggcttcagctgcagctggctacggccaaggtactaaaggctatgggcaaggtcctggagcagcagcaggatctggaggatacggtcaaggtgctggtggctatggacaaggagctgcagtaggttcagctgcaggatctgaagtagcgggataccgtcaaggggctggtggctatggacaaggagttggtgctgcagcaagtgcggctgctggtgcaggagcaggcggatatggccaaggtgccggaggctacgtacaaggtgctggttttgcagcaggtgcggccgctggtgcaggagcaggaggatatggtcaaggtgcagggggctatggacaaggtgctggttctgcagcaggtgcggctgctgctgctgcaggagcaggtggatatggccaagatgccggacgctacacacaaggtgctggttttgcagcaggtgcggctgctggtgcagcagcaggaggatatggtaaagatgctggtgctgcagcaggtgcaggtactggtgcaggaggatatggtcaaggttctggaggctatggacagaatgcgggtgctgcagcaggatcaggagctaatggccaaggtgctggaggctacggacaaggtgctgcagctgttgcggctgctggtgctggagcaggcggatatggccaaggtgcaggaggctatggacaagatgctggaggttatggacaaggtgctggaggcaatgggcaaggtgtagttgatgcagcaggatatggtccaggttctcaaggttacggacaaagtgctgctgcaacctcgtcggctgctgcaggagcatctgctactggctatacagaaagacaaaatgaagttgtcactacagttactactacacgacaggaaactgcagatcgaagacaggcagcaagggcttcagcagcagtatcaacttcagctgcagctggctacggccaaggtactagaggctatgggcaagttcctggagcagcagcaggagctggaggatacggtcaaggtgctggtggctatggacaaggagctgcagtaggttcatctgcaggatctggagtagcgggatacggtcaaggttctggtggctatggacaaagtgctgctgctgcagcaggagcaggcgcttatggccaaggtgctggaggctacggacaaggtgctggtgcggctactggctcaggagcaggaggatgtggccaaggtgcagggggctatggacaagatgctggtgctgcagcaggagcttatggccaaggtgctggtggctacggacaaggtgcggcatctggtgtggctactggaacaggagcaggaggatatggccaaggtgctggaggctacggacaaggtgctagtgctacagctgttgcggctgctggtgcaggagcaggtattattggccaaggtgcaggagtctatggacaaagtgctgtttctgcagcaggggcggctggtgatacaggggcaggcggatatggtcaaagtactggaggctacggaccaggttctggtgctggagcaggtgcggctgctggagcaggtggatatggtccaggttcacaaggctacggacaaggtgctgcctcaacctcctcggctgcagcaggagcatcttccactggctatacagaaagacaaaatgaggtcgttactacagttacttctacacgacaggaaactgcagatcgaagacaggcagcaagggcttcagctgcagctggctatgggcaagttgctgaaagctatgggcaaggtgctccaggctatggtacaggtcaaggagctagtgcagcagcaggtgtggttgctggggctagtgctggcggaagaggatatggccaagtatctggaggctatggacaaggacgaggtgcaggggtagcagcaggtgttgctgcaggagcaggaagatatggccaagggtctggatcggcacccgtatctgctggtggttatggacaagcacaagtttcacgtgcttcaagttcatcggctgttggaacgtcttcatctgtttcaacatcaggcacaagtgggtattctcaagtaagagggggctatggccaaagttcagcaggtggtcaagcttctgcaggttatggacaaatgcaaagtggtgcagttgttagtggtgcaagcgcatcagcggctgtttcatctgcagcttcacgattaagttcggcttcttcctctttcagaataagctctgcagcgtctagcctagcaactggaggagtattga

SEQ ID NO: 77 - protein, 2126 aa, Latrodectus tredicimguttatus
ERNPNNSKSKLQALNMAFASSVSEIAFSENNGISNSAKIQAIIDALRGAFLQTIGTVDQTFLNEISSLVKMFSQVSAENAVSTSAGAAATSVGGYGEQTAGYSQGSAASASSLAAAKTTAGTTGYSAGSTQVSSFVTSTSQAAQSATATSQYGQAQIAGSYSNAAAGATGAYAGGYGQGAGAAGGAGAGDGTGGYGQGAGGYGQGAGAAAGAGAGAGAGGYGQGSGGYGQGASAAAGAAAGAGAGGYGQGAGSAAGAYAGVGGYGQGDGAVAGAAAGAGGYGSGSQGYGQGAAATSSAAAGASSTGYTERQNEVVTTVTTTRQETADRRQAARASAAAGYGQGAGGNGQGPSAAAGARRYGQGAGGYGQGAGSAAGAAAGAGSGGYGQGARGYGQSAGAAAGTGSYGQGAGVAAGAAAGAGAGGNGQGSGGYGQGVSAAAGGAAGAGAGGYGQVAGGYGQGAGFAAGSAAVAGAGGYGQGAGSAAGAGTGTVAGGYGQGAVGYGQGVAAAAGAAAGAERYGPGYQGYGQGAAATSSAAAGASSTGYTERQNEVVTSVTSTRQETADRRQAARASAATGYGPGAGGYGQGPSAVAGAGGYGQGTGGYGQGVGSAAGAAAGAGAGGYGQDNGAAAGAGTGARGYGQGSGGYGQGAGTAAGSGANGQGAGGYALGAGAGAGGYGQGAGGYGQGAGGYVQGASAAVVSAAGAGAGGYSQGAGGYGQGAGGYGQGAGGYGQRAGGYGQGVVDAAGYGPGSQGYGQSAAATSSASAGVSSTGYTERQNEVITTVTTTRQETADQRQAARASAAVSTAAAAGYGQGTKGYGQGPGAAAGSGGYGQGAGGYGQGAAVGSAAGSEVAGYRQGAGGYGQGVGAAASAAAGAGAGGYGQGAGGYVQGAGLAAGAAAGAGAGGYGQGARSYGQGAGSAAGAAAAATGAGGYGQGAGRYTQGAGFAAGAAAGAAAGGYGKDAGAAAGAGTGAGGYGQGSGGYGQNAGAAAGSGANGQGAGGYGQGAAAVAAAGAGAGGYGQGAGGYGQDAGGYGQGAGGNGQGVVDAAGYGPGSQGYGQSAAATSSAAAGASATGYTERQNEVVTTVTTTRQETADRRQAARASAAVSTSAAAGYGQGTRGYGQVPGAAAGAGGYGQGAGGYGQGAAVGSSAGSGVAGYGQGSGGYGQGAAAAAGAGAYGQGAGGYGQGAGAATGSGAGGYGQGAGGYGQDAGAAAGAYGQGAGGYGQGAASGVATGTGAGGYGQGAGGYGQGASATAVAAAGARAGIIGQGAGVYGQGAVSAAGAAGDTGAGGYGQSTGGYGPGFGAVAGAAAGAGGYGPGSQGYGQGATSTSSAAAGASSTGYTERQNEVVTTVTSTRQETADRRQAARASAAAGYGQGTKGYGQGPGAAAGSGGYGQGAGGYGQGAAVGSAAGSEVAGYRQGAGGYGQGVGAAASAAAGAGAGGYGQGAGGYVQGAGFAAGAAAGAGAGGYGQGAGGYGQGAGSAAGAAAAAAGAGGYGQDAGRYTQGAGFAAGAAAGAAAGGYGKDAGAAAGAGTGAGGYGQGSGGYGQNAGAAAGSGANGQGAGGYGQGAAAVAAAGAGAGGYGQGAGGYGQDAGGYGQGAGGNGQGVVDAAGYGPGSQGYGQSAAATSSAAAGASATGYTERQNEVVTTVTTTRQETADRRQAARASAAVSTSAAAGYGQGTRGYGQVPGAAAGAGGYGQGAGGYGQGAAVGSSAGSGVAGYGQGSGGYGQSAAAAAGAGAYGQGAGGYGQGAGAATGSGAGGCGQGAGGYGQDAGAAAGAYGQGAGGYGQGAASGVATGTGAGGYGQGAGGYGQGASATAVAAAGAGAGIIGQGAGVYGQSAVSAAGAAGDTGAGGYGQSTGGYGPGSGAGAGAAAGAGGYGPGSQGYGQGAASTSSAAAGASSTGYTERQNEVVTTVTSTRQETADRRQAARASAAAGYGQVAESYGQGAPGYGTGQGASAAAGVVAGASAGGRGYGQVSGGYGQGRGAGVAAGVAAGAGRYGQGSGSAPVSAGGYGQAQVSRASSSSAVGTSSSVSTSGTSGYSQVRGGYGQSSAGGQASAGYGQMQSGAVVSGASASAAVSSAASRLSSASSSFRISSAASSLATGGVL

SEQ ID NO: 78 - DNA, 4406 bp, Latrodectus tredicimguttatus
  CDS (3)..(4406)
gcttcgtctctttagatgccgccagtgtctgggacagcaccgcgacagctgaagcttttattggaagcttcaattctggcatggaaagatctggtgtactgtcacgttctcagatggatgatatctcatccattagcgacaccataatatctgccattgagagaaacccaaacaactcgaaatcgaaactgcaagctttaaacatggcttttgcttcatcagtttcggaaattgcgttctctgagaacaatggaatttcaaacagtgctaaaatacaagcgattattgatgcactcagaggagcatttcttcaaactattggtacggttgatcaaacctttttgaatgaaatttctagtctcgtaaaaatgttttcacaggtctcagcagaaaacgcagtttcaacaagtgctgaatcagcagctaccagtggtggtggttacggacaacaaagtggtgggtatagtcaaggttccgctgcgtcagcatcttcttcagcaggagcaagaacctctgtaggcacttctggatattctgctggttcaacacaagtcttctccactacaagctctacaagccaagctgcgcaatcagcaaccgcaaccagtcagtatggccaagcacaaagtgccggatcttatagtaacgcagctgctggagctacaggtgcttatgcaggaggatacggtcagggtgctggtgctgcagcaggcgcgggtgcaggtgctggagcaggaggatatggccaaggcgcaggaggatatggagaaggtgctggagactacggacaaggtgctggtgctgcagcaggagcgggtgctggagctgcagcaggtgtgggtgcaggtgctggagcaggaggatatggccaaggcataggaggctatgggcaaggtgctggtgctggcgcaggagcaggagtatatggccaaggtgctggaggctacggacaaggtgctgcgtctgaagcagcaggaggatatggccaaggtgctggtgatgcagcaagtgcaggcgctggagcaggagcttatggccaaggtgctggaggctatggacaaggtgctggtgctgcagcaagtgcgggagctggagcaggagcaggaggatatggccaaggtgttggaggctacgcacaaggtgttggatcagcagcaggtgcaggcgctggagcaggagcttatggccaaggtgctggaggctatggacaaggtgctggtgctgcagcaggtgcaggagcaggcggatatggccaaagtgctggtgctgcagcaggtgcggctgctggcgcaggagcaggaggatatggccaaggtgctggaggctacggacaaggtactggttctgcagcaggtgcagcggctggtgcaggagcaggcggatatgggcaaggtgcaagaagctatggacaaggtgcaggaagctacggacaaggagctggtgctgcagcaggagcaggcgctggtgcaggaggatatggccaaggtgccggaggctatggaccaggtgctggtgctgcagtcggtgcggctggtggtgcaggagcaggaggatatggcctaggtgcaggaggctatggacaaggtgctggtgctgcagccggtgcggctggtggtgcaggagcaggaggatatggccgaggtgctggaggctacggacaaggagttagtgctgcaggaggttcggttgctggtgcaggagcaggaggatatggtcaaggttctcaaggatacggacaaggtgctgctgcaacctcatcggctgcagcaggagcatcttccactggctatacagaaagacaaaatgaggttgtcactacagttactactacacgacaggaatctgcagattatgctagaaaacaggcagccagtgcagcgacagcgacatctgctggagcttacggtcaaaatgctggaggttatggacaaggtgctggagcaggaggatacggacaaggtgctggagccggtgctggagccggtgctggagctggtgcaggtgcggctgcaggtgcaggggcaggaggttatggtcaaggtgctggaggttatggacgaggccaaggagctgctgcagcagcaggtgcaggtgctggaggatacggacaaggtgctggagccggtgctggagctggtgctggtgcggctgcaggtgcaggtgcaggaggatatggtcaaggtgctggaggctatggaaaaggccagggagctgctgctgcagcatttgctggagcaggaggatacggacaaggtgctggagccggtgctggagcctatgctggagccggtgctggagctgttgcaggtgcggctgcaggtgcaggggcaggaggttatggtcaaggtgctggaggctatggacgaggccaaggagctgcagcagcaggtgcaggtgctggagcaggaggatacggacaaggtgctggagctggtgcaggtgcggctgcaaatgcaggggcaggaggttatggtcaaggtgctggaggatatggacgaggtcaaggagctgctgcagcagcaggtgcaggtgctggagcaggaggatacggacaaggtgctggagccggaactggagctgctgctggtgcaggtgcatctgctggtgctggagtcggtgctggtgcaggtgcggctgcaggtgcggctgcaggtgcaggggcaggaggatatggtcaaggtgctggaggctatggaccaggccaaggagctgccgcagcagcaggtgcaggtgctggagcaggaggatacggacaaggttctggagccggtgctggagctggtgcaggtgcggctgcaggtgcaggggcaggaggttatggtcaaggtgctggaggctatggacgaggccaaggagctgcagcagcaggtgcaggtgctggagcaggaggatacggacaaggtgctggagctggtgtaggtgcgactgcaagtgcaggggcaggaggttatggtcaaggtgctggaggatatggacgaggtcaaggagctgctgcagcagcaggtgcaggtgctggagcaggaggatacggacaaggtgctggatccagagctggagctggtgcttttgcaggtgcggctgcaggggcaggaggatatggtcaaggtgctggaggatatggacaaggacaaggagcggctggagcagcaggtgctggtgcaggaggatatgttcaaggtgctggaggctatggacgaggccaaggagctgctactggagcaggaggatacggaaaaggtgctggagccggggctggagcctatgctggagccagtgctggagttggtgcaggtgcggctgcaggtgctggggccaaaggttatggtcaaggtgctggaggccatggacaaggccaaggagctgcagcagcaggtgcaggtgctggagcagaaggatacggacaaggtgctggagctggtgctggagctggtgcaggtgcggctgcaggtgcaggggcaggtggttttggtcaaggtgctggagactatggacgaggccaaggagctgcagcagcaggtgcaggtgctggagcaggaggatacggacaaggtgctggagctggtgcaggtgcggctgcaagtgcaggggcaggaggttatggtcaaggtgctggaggatatggacgaggtcaaggagctgctgcagcaacaggtgcaggtgctggagcaggaggatacggacaaggtgctggagccggagctggagctgctgctggtgcaggtgcatctgctggtgctggagcaggaggatacggacaaggtgctggagccggtgctggtgcaggtgcggctgcaggtgcaggggcaggaggatatggtcaaggtgctggaggctatggacgaggccaaggagctgcagcagcagcaggtgcaggtgctggagcaggaggatacggacaaggtgctggagccgttgctggagcctatgctggagccggtgctggagctggtgcaggtgcggctgcaggagcaggaatatatgcccaagggtctggatcggcatccgcatcagctaatggttatggacaagcacaagtttcacgtgcttcaagttcatcggctgttggaacgtcttcatctgtttcaacatcaggcacaagtgggtattctcaagtaagaggaggctatggccaaagttcagcaggtggtcaagcttctgcaggttatggacaaatgcaaaatagtgcatctgttagtggtgcaagcgcatcagcggctgtttcatctgcagcttcacgattaagttccgcttcttcctcttccagaataagctctgcagcgtctagcctagcaactggaggagtattgaataccgctgcactgccttcggtagtttctaatattatgtctcaagtttctgctagcagtcctggaatgtcatcaagtgaagttgttatccaagcccct

SEQ ID NO: 79 - protein, 1468 aa, Latrodectus tredicimguttatus
FVSLDAASVWDSTATAEAFIGSFNSGMERSGVLSRSQMDDISSISDTIISAIERNPNNSKSKLQALNMAFASSVSEIAFSENNGISNSAKIQAIIDALRGAFLQTIGTVDQTFLNEISSLVKMFSQVSAENAVSTSAESAATSGGGYGQQSGGYSQGSAASASSSAGARTSVGTSGYSAGSTQVFSTTSSTSQAAQSATATSQYGQAQSAGSYSNAAAGATGAYAGGYGQGAGAAAGAGAGAGAGGYGQGAGGYGEGAGDYGQGAGAAAGAGAGAAAGVGAGAGAGGYGQGIGGYGQGAGAGAGAGVYGQGAGGYGQGAASEAAGGYGQGAGDAASAGAGAGAYGQGAGGYGQGAGAAASAGAGAGAGGYGQGVGGYAQGVGSAAGAGAGAGAYGQGAGGYGQGAGAAAGAGAGGYGQSAGAAAGAAAGAGAGGYGQGAGGYGQGTGSAAGAAAGAGAGGYGQGARSYGQGAGSYGQGAGAAAGAGAGAGGYGQGAGGYGPGAGAAVGAAGGAGAGGYGLGAGGYGQGAGAAAGAAGGAGAGGYGRGAGGYGQGVSAAGGSVAGAGAGGYGQGSQGYGQGAAATSSAAAGASSTGYTERQNEVVTTVTTTRQESADYARKQAASAATATSAGAYGQNAGGYGQGAGAGGYGQGAGAGAGAGAGAGAGAAAGAGAGGYGQGAGGYGRGQGAAAAAGAGAGGYGQGAGAGAGAGAGAAAGAGAGGYGQGAGGYGKGQGAAAAAFAGAGGYGQGAGAGAGAYAGAGAGAVAGAAAGAGAGGYGQGAGGYGRGQGAAAAGAGAGAGGYGQGAGAGAGAAANAGAGGYGQGAGGYGRGQGAAAAAGAGAGAGGYGQGAGAGTGAAAGAGASAGAGVGAGAGAAAGAAAGAGAGGYGQGAGGYGPGQGAAAAAGAGAGAGGYGQGSGAGAGAGAGAAAGAGAGGYGQGAGGYGRGQGAAAAGAGAGAGGYGQGAGAGVGATASAGAGGYGQGAGGYGRGQGAAAAAGAGAGAGGYGQGAGSRAGAGAFAGAAAGAGGYGQGAGGYGQGQGAAGAAGAGAGGYVQGAGGYGRGQGAATGAGGYGKGAGAGAGAYAGASAGVGAGAAAGAGAKGYGQGAGGHGQGQGAAAAGAGAGAEGYGQGAGAGAGAGAGAAAGAGAGGFGQGAGDYGRGQGAAAAGAGAGAGGYGQGAGAGAGAAASAGAGGYGQGAGGYGRGQGAAAATGAGAGAGGYGQGAGAGAGAAAGAGASAGAGAGGYGQGAGAGAGAGAAAGAGAGGYGQGAGGYGRGQGAAAAAGAGAGAGGYGQGAGAVAGAYAGAGAGAGAGAAAGAGIYAQGSGSASASANGYGQAQVSRASSSSAVGTSSSVSTSGTSGYSQVRGGYGQSSAGGQASAGYGQMQNSASVSGASASAAVSSAASRLSSASSSSRISSAASSLATGGVLNTAALPSVVSNIMSQVSASSPGMSSSEVVIQAP

SEQ ID NO: 80 - DNA, 560 bp, Steatoda grossa
  CDS (3)..(560)
tggaaagatctagggttttgtcgagctcccaagtggaagatatagcttcaataagtgatacaattatatctgctattgaaagaaatccaaacaattcaagatcgaaacttcaagccttaaacatggcttttgcttcatcagtctcggaaattgcattttccgaaagcaatggtatttcgaatagtgttaaaatacaggcaatcatcaatgcattgaagggagcattcttgcaaacaacaggaacagtagatcaaatatttttaaatgaaatcgggagtttagtaagaatgttttcacaagtatcagcagaaaacgaaatttctgcaagcgctgcaactaacactgctgtagcctcagcagcatcatctactgcgagtcagaacggtcaaggcacagtaggttacggtcaaaggcaaggtacaggagcagcacagggtgcaggatcaggaggacaaagcacaggagcatcatctgcagcaacagctagcgctggaacaagtggatacggtccaggttatcctggatacggacaagccccagcagctggaccaacagcagca

SEQ ID NO: 81 - protein, 186 aa, Steatoda grossa
ERSRVLSSSQVEDIASISDTIISAIERNPNNSRSKLQALNMAFASSVSEIAFSESNGISNSVKIQAIINALKGAFLQTTGTVDQIFLNEIGSLVRMFSQVSAENEISASAATNTAVASAASSTASQNGQGTVGYGQRQGTGAAQGAGSGGQSTGASSAATASAGTSGYGPGYPGYGQAPAAGPTAA

SEQ ID NO: 82 - DNA, 3196 bp, Steatoda grossa
  CDS (2)..(3106)
atcatctgcagcagcagctagcgctggaacaagtggatacggtccaggtgttagtggatatggaccaggacagcgtgcaggaccaggacagggtgcaggaccagggcagggtgtaggaccaggacagggagtgggaacaggaggacaaggcactggagcttcatctgcagcagcagctagcgctggaacaagtggatacggtccaggtgttagtggatatggaccagcacagggtgcaggaccaggaggacaaggcacgggagcatcatctgcagcggcaaccagcgctggaacaagtggatacggtccaggttatcctggatacggacaaggcccagcatctggacccactgcagataaatatggaccaggaatcggaagatatgcaccaggaaggagtacaacatcaacatctgcagcaacagctagtgcaacaactgtaaataatggacctcaaattggaggttatggaccaggacagggtatcggaccagcagcaacatcagctcctggagcaagtggatacggtccaggtgttagtggatatggaccaggacagggtgcaggaccaggacagggtgcgggaccatggcagggtgtaggaccaggacagggtgcaggaccaggaggacaaggctctggagcatcatctgaagcagcagctagcgctggaacaagtgcatacggtccaggtgttagtggatatggaccaggacagggtgcaggacctggaggacaaggctctggagcatcatctagagcagcagctagcgctggaacaagaggatacggtccaggttatcctggatacggacaaggcccagcatctggaccaacagcagcatataaatatggaccaggaatcggaggatatgcaccaggaaggagtacaacatcaacatcagcagcaacagctagtgcaacaactgtagatattggacctcaagttggaggttacggaccaggacagggtatagcaccagcagcagcagctcctggatcaagtggatacggtccaggtgttagtggatatggaccaggccagggtgcaggaccaggaggacaaggcactggagcatcttctgcagccgcagctagcgctggaacaagtggatacggttcaggtgttagtggatatggaccaggacagggtgcaggaccgggacagggtgcaggaccagggcagggtgtaggaccagggcagggtgcaggactagggcagggtgtaggaccaggacagggtgcaggaccaggaggacaaggctctggagcatcaactgcagcagcagctagcgctggaacaagtggatacgctccaggtgtaagtggatatggaccaggacagggtgcaggaccaggacagggtgcaggaccaggacagggtgcaggaccagggcagggtgtaggaccaggacagggtgcaggaccaggaggacaaggctctggagcatcatctgcagcagcagctagcactggaacaagtggatacggtccaggtgtaagtggatatggaccaggacagtatgcgggaccgggacaggttgcaggaccagggctgggtgtaggaccaggactgggtgcaggactaggaggacaaggctctggagcatcatctggagcagcagctagcgctggaacaagtggatacggtccaggttatcctggatacggacaagtcccagcatctggaccaacagcagcatataaatatggaccaggaatcggaggatacgcaccaggaagaagtacaacttcaacatcagcagcaacagctagtgcaacaactgtagataatggacctcaatttggaggttatggaccaggacagggtatagcaccagcagcagcagctcctggagcaagtggatacggtccaggtgttagtggatatggaccaggacagggtgcaggaccaggacagggtgcaggaccaggaggacaaggcactggagcatcatctgcagcagcagctagcgctggaacaagtggatacggtccaggtgttagtggatatggaccaggacagggtgcaggaccaggacagggtgcaggaccagggcagggtgtaggactaggacagggagtgggaccaggagtacaaggcactggagcatcatctgcagcagcagctagcgctggaacaagtggatacggtccaggtgttagtggatatttaccaggaccgggtgcaggaccagcacagggtgcaggaccaggaggacaaagcacaggagcatcatcttcagcagcagctggcgctggaacaagtggatacggtccaggttatcctggatacggacaaggcccagcatctggacccactgcagataaatatgggccaggaatcggaagatatgcaccaggatggagtacaacatcaacaactgcagcaacagctagtgcaacaactgtaaataatggacctcaaattggaggttatggaccaggactgggtataggaccagcagcagcatcagctactggagcaagtggatacggtccaggtgttagtggatatggaccaggacagggtgcaggaccaggaggacaaggacaaatcactggagcagcatctgcaacagcagctaccgctggaacaagtggatacggttcaggttatcctggatacggacaaggcccaggagctggaccatcatcagcaggtcaatacgttccagtaattggaggatatggaccaggacaaggtacaggattcgtagcaacccctactgttggagcaagtggatacggtcctcagtttgttggtgctataagtagtactagtgcatctgctgtttcttcttctgcgtcaagattaagctctccttctgcttcatcaaggataagttcggcagcatctagtttagcttcaggtggtgccgtaaatacagcttctcttccatcagttatttctaatatagtttcccaaattagagcgagcaatcctggtatttcatcaaatgaagttcttattcaagcacttctagagttaatatcatcccttatgcatattctcagttctgctaatattggtcaaattgactttggctccgttggaaatacagcttcagttgtaagtcagtcgtttggagccgctctaggctgagtattttcgaatatccgaatctctttatgtaatgattgttagttatcattcacatacaatgttataaacataataaatgatttattattt

SEQ ID NO: 83 - protein, 1034 aa, Steatoda grossa
SSAAAASAGTSGYGPGVSGYGPGQRAGPGQGAGPGQGVGPGQGVGTGGQGTGASSAAAASAGTSGYGPGVSGYGPAQGAGPGGQGTGASSAAATSAGTSGYGPGYPGYGQGPASGPTADKYGPGIGRYAPGRSTTSTSAATASATTVNNGPQIGGYGPGQGIGPAATSAPGASGYGPGVSGYGPGQGAGPGQGAGPWQGVGPGQGAGPGGQGSGASSEAAASAGTSAYGPGVSGYGPGQGAGPGGQGSGASSRAAASAGTRGYGPGYPGYGQGPASGPTAAYKYGPGIGGYAPGRSTTSTSAATASATTVDIGPQVGGYGPGQGIAPAAAAPGSSGYGPGVSGYGPGQGAGPGGQGTGASSAAAASAGTSGYGSGVSGYGPGQGAGPGQGAGPGQGVGPGQGAGLGQGVGPGQGAGPGGQGSGASTAAAASAGTSGYAPGVSGYGPGQGAGPGQGAGPGQGAGPGQGVGPGQGAGPGGQGSGASSAAAASTGTSGYGPGVSGYGPGQYAGPGQVAGPGLGVGPGLGAGLGGQGSGASSGAAASAGTSGYGPGYPGYGQVPASGPTAAYKYGPGIGGYAPGRSTTSTSAATASATTVDNGPQFGGYGPGQGIAPAAAAPGASGYGPGVSGYGPGQGAGPGQGAGPGGQGTGASSAAAASAGTSGYGPGVSGYGPGQGAGPGQGAGPGQGVGLGQGVGPGVQGTGASSAAAASAGTSGYGPGVSGYLPGPGAGPAQGAGPGGQSTGASSSAAAGAGTSGYGPGYPGYGQGPASGPTADKYGPGIGRYAPGWSTTSTTAATASATTVNNGPQIGGYGPGLGIGPAAASATGASGYGPGVSGYGPGQGAGPGGQGQITGAASATAATAGTSGYGSGYPGYGQGPGAGPSSAGQYVPVIGGYGPGQGTGFVATPTVGASGYGPQFVGAISSTSASAVSSSASRLSSPSASSRISSAASSLASGGAVNTASLPSVISNIVSQIRASNPGISSNEVLIQALLELISSLMHILSSANIGQIDFGSVGNTASVVSQSFGAALG

SEQ ID NO: 84 - DNA, 920 bp, Steatoda grossa
  CDS (3)..(920)
acacaactgcctccaagctgagaaaggcaagcctggccgtgtccagagtacgaatgggatccgacacaaatgcatacgctcaagctatcgctaacgcattcgccgatgtgttatcatctagcggaaaggtttctggtgcaaatataaatcagatcgccccacaaattgctagtggaatcgtaataggagtttcgtcaaatgcgtcgcaattaggagtcgatttgtcaggtatcaacgtgacgcttgacctctccaacgtatcaagtaatatgcaaacttccatacaaggaggtgcaatccaaatgactgttgaaggacctgaatcgggtgctggatatcctggagcgcctacagatttgtatgctcctgatagcggtgcgccttccgatgtatctcgcggaggggacacgacaacgaaacttttgcaggctctagtacctgcacttctcaagtcagatgtcttcaaagcaatctacaagagaggtactcgtaagcagatcgtgcagtatgtatcaaactcagcattgcagcaagctgcttcaagcttaggattagatgattccacgatctcacagttgaaaaataaagcaaatcaagctttgtcttccgtaagtgcagactctgactctagtgcatacgcaaaagcaattgctctggctgtcgctcaagtattaggaaccagcggacaggtgaatgacggaaatgtcaaccaaatcggagcaaaacttgcaaccggcattttgaaaggatcatctgctctagcacctcgagttggaatcgatctttctggtattaatgtagaatctgacataggaagcgtcacatcctatatgttgtcgggaggagcacttactgtccagacgacaataccggtgggaggagatgatttgtcagattctacattaataccagaaagatcg

SEQ ID NO: 85 - protein, 306 aa, Steatoda grossa
TTASKLRKASLAVSRVRMGSDTNAYAQAIANAFADVLSSSGKVSGANINQIAPQIASGIVIGVSSNASQLGVDLSGINVTLDLSNVSSNMQTSIQGGAIQMTVEGPESGAGYPGAPTDLYAPDSGAPSDVSRGGDTTTKLLQALVPALLKSDVFKAIYKRGTRKQIVQYVSNSALQQAASSLGLDDSTISQLKNKANQALSSVSADSDSSAYAKAIALAVAQVLGTSGQVNDGNVNQIGAKLATGILKGSSALAPRVGIDLSGINVESDIGSVTSYMLSGGALTVQTTIPVGGDDLSDSTLIPERS

SEQ ID NO: 86 - DNA, 18059 bp, Argiope argentata
aagcttaacaaatgttggaacataatgataacgatatttgtgttgtattcatattcatttaacttagagatgttgctactctaagacttcaaaacacaaaacattggataaaaaaattcattgcagattaaagtcatattttggaaccaaaaatttgtaatcaatcggaaaaagattataaaaaaataattgaaatacaaaatgaactaaaacttgtggaaaattgtaaaaaaagtgttgagctagatgaatggaattttaacaaatgttggaacatagagataacgctatttgtgttgtattcatattcattaaacttataggtgctgttactctaagacttcaaaacacaaagcattggataaaaaaaattgattgcagattaaagtcaaattttggaaccaaaggttcgtaatcaatcggaagagaattataacaaaaatcattgaaatacaaaatgaagtaaaacttgtggagaaacaggagaaaattagagtaaaaaccttttctcaggacaaactaaagtttcatgacagcaaaatcttgaagggatgttagttaaatgatcgatttctttttttaaaaatataacaggtgagcatgccaaattgcagtgctgttattttatgcaataaaaataatcagattttgagttccaatcaatggtattcgttaattattatgcaactataattcatttcaattctttaatgccgaatatatcattattttcaataatgatgttgtctaagtaatcgtttgtttggagaattcttcaaactctaattctttagaagtaagtttagacattcttttcatttatttaatacttcatcgcaaattattccataataagtaaaaaaaaaaatgaaagacagaattttttgaaaacatttataaaaaaattgtaacaattcgagaaaaatacgtatgtcagacagatgattattgatgatgatgatgtcaggtccgctttttaacacggaaagaggggtacagtagcttctgagggtatggacccctgagcacgcgaggttaggaatttgacttccagcacgtaagtatgattgaccacacactctcttgcacaacccctcttgacagggagatacattcatacacttcatacatagtaagtacacagaagagcaaccattccataaccgggattcgaacccgaaacgcccagatcacgaagaagacatactacctctgggacaggacacaaacacaacatcaaattgaatactctttttcaaaatagagtaaataatcaatttcagaattgcttccatagaaaagaacttttaatgatatctttaaagtaagaataattcaaataagaatcttaaaattcatttcccaagaaaatatattcatggtttttcaaacaaacttataaaaattaccggataatttaacttcttttaattaaatataaattataatcgataaaaaaatacatatgaaaggaatttaacattcgagaagaaaggtataaacttgaaccttaaaagaatactaaattagagtcttcctgttccactagctataccaacactatattgaacattcaaatacgtaaataggaatatcgtccctcttacaattctaaaaatcaaatgaataattgcttttttaatgacaagatgcattcaaatcgtgagatctctaaaaactattttacgacactgcgttttagagagtcataaaagaatcacaagatgaaacgggaaatattcagtaattggaattttgaaaaaaaaatcaaaaagagacgtcagtatttccacctgcacggagtcacgaattttatagtataaaaggagggaggatgacaggctgaagtacgttcggttgaacaactcagttattcagccatgaattggttacctactctcgcttttgcgattctactgctgtcagtccagtacgatgcggtgcaaagcgcgtcaactctgtccaggagtccttgggccaatccggccaaagctggttctttgatgaactgtctcatgagcagaatcgccagttcaaatgtcctgcctcaacaagataaagaagatctggaatccattatggacacactgatgtcggcaattaaaggagcgagtgccaaaggtaaaagctctgcagcgcagttgcaggcgataaatatggctgttgcttcttccctggcagaaatagtcgttgctgaagatgcaggcaatcaagcaagcatcgcagtaaagactcaggcccttacaggtgctctgggacaatgcttccaagcagtcatgggcacagtcgacaggaaattcatcaatgaaataaatgacttgataacaatgtttgcaaaagaagctgccagtgaaagcaacgaaataccagatcaagaatctttctccgcaagcggatcatctgcttcaacgtcgtatcaagcagcaagccaaagtttccaagggtcatcacaaacaacaggcggaattagtacatatccccagcctcaagtttcgcaatcagcaacattcggcattgggtcagttggaaatactggtggtgctggatcatatggtgggggattgcaatcaggctcagtaaccggtggaacttcttttggtcaaacatccactttatcaactagtttgtctcagacaggaggtatatctaccagtggggccggttacaacggaccagttggatacagagggcctgttggtggaggatcacagttcggaactgattcaagccaaacagctaatcttatctccagagtagcaaacgcactttccaatacgtccacattgaggacagttctccgcagaggtgtgtcccaacagattgcctcaagtatattgcgaagagccgctcagactttggccagtactctcggagtcgacggaaacaacttgtccagagtagcattacaagccatctctcaagtgcccacagggtctgacacttcagcttacgctcaagccttctctagtgcgctcttcaatgccggagttctcaacgcaagcaacattgacacattgggatcccgagttctctcagctgttttgaacggagtatcaagtgcggcgcaaggtcttggcatcaatgtagataccggcagtgtacagagtgacattagttccagtagcagcttcctctcaaccagctcgtctgcgtccagtttctcctctcaggcatcagcttcttctaccagcggtgctggatacaccggaccttctggctacacaggaccagtgggtggcggagcgcagttcggttctgcttcaggccaaagctctttcggtcagacatcaggatttaccgcatcttctggcggacaagccgctttcggtggaaccagtggagcgtctgctggcctcatctccagagtagcaaacgcacttgccaatacatccacattgagagctgtcctccgaagaggtgtatcccaacagactgcctccagcgtggtacagagagccgctcagtcgttggccagtactctcggaatcgacggaaacaacttgtccagagtagcattacaagccacctctcaagtgcccacagggtctgacacttcagcttacgctcaagccttctctagtgcgctcttcaatgccggagttctcaacgcaagcaacattgacacattgggatcccgagttctctcagctgttttgaacggagtatcaagtgcggcgcaaggtcttggcatcaatgtagataccggtagtgtacagagtgacattagttccagtagcagcttcctctcaaccagctcgtctgcgtccagtttctcctctcaggcatcagcttcttctaccagcggtgctggctacaccggaccttctggctacacaggaccagtgggtggcggagcgcagttcggttctgcttcaggccaaagctctttcggtcagacatcaggatttaccgcatcttctggcggacaagccgctttcggtggaaccagtggagcgtctgctggcctcatctccagagtagcaaacgcacttgccaatacatccacattgagagctgtcctccgaagaggtgtatcccaacagactgcctccagcgtggtacagagagccgctcagtcgttggccagtactctcggagtcgacggaaacaacttgtccagagtagcattacaagccatctctcaagtgcccacagggtctgacacttcagcttacgctcaagccttctctagtgcgctcttcaatgccggagttctcaacgcaagcaacattgacacattgggatcccgagttctctcagctgttttgaacggagtatcaagtgcggcgcaaggtcttggcatcaatgtagataccggcagtgtacagagtgacattagttccagtagcagcttcctctcaaccagctcgtctgcgtccagtttctcctctcaggcatcagcttcttctaccagcggtgctggctacaccggaccttctggctacacaggaccagtgggtggcggagcgcagttcggttctgcttcaggccaaagctctttcggtcagacatcaggatttaccgcatcttctggcggacaagccgctttcggtggaaccagtggagcgtctgctggcctcatctccagagtagcaaacgcacttgccaatacatccacattgagagctgtcctccgaagaggtgtatcccaacagactgcctccagcgtggtacagagagccgctcagtcgttggccagtactctcggagtcgacggaaacaacttgtccagagtagcattacaagccatctctcaagtgcccacagggtctgacacttcagcttacgctcaagccttctctagtgcgctcttcaatgccggagttctcaacgcaagcaacattgacacattgggatcccgagttctctcagctgttttgaacggagtatcaagtgcggcgcaaggtcttggcatcaatgtagataccggcagtgtacagagtgacattagttccagtagcagcttcctctcaaccagctcgtctgcgtccagtttctcctctcaggcatcagcttcttctaccagcggtgctggctacaccggaccttctggctacacaggaccagtgggtggcggagcgcagttcggttctgcttcaggccaaagctctttcggtcagacatcagaatttaccgcatcttctggcggacaagccgctttcggtggaaccagtggagcgtctgctggcctcatctccagagtagcaaacgcacttgccaatacatccacattgaaagctgttctccgaagaggtgtatcccaacagactgcctccagcgtggtacagagagccgctcagtcgttggccagtactctcggagtcgacggaaacaacttgtccagagtagcattacaagccatctctcaagtgcccacagggtctgacacttcagcttacgctcaagccttctctagtgcgctcttcaatgccggaattctcaatgcaagcaacattgacacattgggatcccgagttctctcagctgttttgaacggagtatcaagtgcggcgcaaggtcttggcatcaatgtagataccggcagtgtacagagtgacattagttccagtagcagcttcctctcaaccagctcgtctgcgtccagtttctcctctcaggcatcagcttcttctaccagcggtgctggctacaccggaccttctggctacacaggaccagtgggtggcggagcgcagttcggttctgcttcaggccaaagctctttcggtcagacatcaggatttaccgcatcttctggcggacaagccgctttcggtggaaccagtggagcgtctgctggcctcatctccagagtagcaaacgcacttgccaatacatccacattgagagctgtcctccgaagaggtgtatcccaacagactgcctccagcgtggtacagagagccgctcagtcgttggccagtactctcggagtcgacggaaacaacttgtccagagtagcattacaagccatctctcaagtgcccacagggtctgacacttcagcttacgctcaagccttctctagtgcgctcttcaatgccggagttctcaacgcaagcaacattgacacattgggatcccgagttctctcagctgttttgaacggagtatcaagtgcggcgcaaggtcttggcatcaatgtagataccggcagtgtacagagagacattagttccagtagcagcttcctctcaaccagctcgtctgcgtccagtttctcctctcaggcatcagcttcttctaccagcggtgctggctacaccggaccttctggctacacaggaccagtgggtggcggagcgcagttcggttctgcttcaggccaaagctctttcggtcagacatcaggatttaccgcatcttctggcggacaagccgctttcggtggaaccagtggagcgtctgctggcctcatctccagagtagcaaacgcacttgccaatacatccacattgaaagctgtcctccgaagaggtgtatcccaacagactgcctccagcgtggtacagagagccgctcagtcgttggccagtactctcggagtcgacggaaacaacttgtccagagtagcattacaagccatctctcaagtgcccacagggtctgacacttcagcttacgctcaagccttctctagtgcgctcttcaatgccggagttctcaatgcaagcaacattgacacattgggatcccgagttctctcagctgttttgaacggagtatcaagtgcggcgcaaggtcttggcatcaatgtagataccggcagtgtacagagtgacattagttccagtagcagcttcctctcaaccagctcgtctgcgtccagtttctcctctcaggcatcagcttcttctaccagcggtgctggctacaccggaccttctggctacacaggaccagtgggtggcggagcgcagttcggttcagcttcaggccaaagctctttcggtcagacatcaggatttaccgcatcttctggcggacaagccgctttcggtggaaccagtggagcgtctgctggcctcatctccagagtagcaaacgcacttgccaatacatccacattgagagctgtcttccgaagaggtgtatcccaacagactgcctccagcgtggtacagagagccgctcagtcgttggccagtactctcggagtcgacggaaacaacttgtccagagtagcattacaagccatctctcaagtgcccacagggtctgacacttcagcttacgctcaagccttctctagtgcactcttcaatgccggagttctcaatgcaagcaacattgacacattgggatcccgagttctctcagctgttttgaacggagtatcaagtgcggcgcaaggtcttggcatcaatgtagataccggcagtgtacagagtgacattagttccagtagcagcttcctctcaaccagctcgtctgcgtccagtttctcctctcaggcatcagcttcttctaccagcggtgctggctacaccggaccttctggctacacaggaccagtgggtggcggagcgcagttcggttctgcttcaggccaaagctctttcggtcagacatcaggatttaccgcatcttctggcggacaagccgctttcggtggaaccagtggagcgtctgctggcctcatctccagagtagcaaacgcacttgccaatacatccacattgagagctgtcctccgaagaggtgtatcccaacagactgcttccagcgtggtacagagagccgctcagtcgttggccagtactctcggagtcgacggaaacaacttgtccagagtagcattacaagccatctctcaagtgcccacagggtctgacacttcagcttacgctcaagccttctctagtgcgctcttcaatgccggagttctcaatgcaagcaacattgacacattgggatcccgagttctctcagctgttttgaacggagtatcaagtgcggcgcaaggtcttggcatcaatgtagataccggcagtgtacagagtgacattagttccagtagcagcttcctctcaaccagctcgtctgcgtccagtttctcctctcaggcatcagcttcttctaccagcggtgctggctacaccggaccttctggatacacaggaccagtgggtggcggagcgcagttcggttctgcttcaggccaaagctctttcggtcagacatcaggatttaccgcatcttctggcggacaagccgctttcggtggaaccagtggagcgtctgctgacctcatctccagagtagcaaacgcacttgccaatacatccacattgagagctgtcctccgaagaggtgtatcccaacagactgcctccagcgtggtacagagagccgctcagtcgttggccagtactctcggagtcgacggaaacaacttgtccagagtagcattacaagccatctctcaagtgcccacagggtctgacacttcagcttacgctcaagccttctctagtgcgctcttcaatgccggagttctcaatgcaagcaacattgacacattgggatcccgagttctctcagctgttttgaacggagtatcaagtgcggcgcaaggtcttggcatcaatgtaaataccggcagtgtacagagtgacattagttccagtagtagcttcctctcaaccagctcgtctgcgtccagtttctcctctcaggcatcagcttcttctaccagcggtgctggctacaccggaccttctggctacacaggaccagtgggtggtggagcgcagttcggttctgcttcaggccaaagttctttcggtcagacatcaggatttaccgcatcttctggcggacaagccgctttcggtggaaccagtggagcgtctgctggcctcatctccagagtagcaaacgcacttgccaatacatccacattgagagctgtcctccgaagaggtgtatcccaacagactgcctccagcgtggtacagagagccgctcagtcgttggccagtactctcggagtcgacggaaacaacttgtccagagtagcattacaagccatctctcaagtgcccacagggtctgacacttcagcttacgctcaagccttctctagtgcactcttcaatgccggagttctcaatgcaagcaacattgacacattgggatcccgagttctctcagctgttttgaacggagtatcaagtgcggcgcaaggtcttggcatcaatgtagataccggcagtgtgcagagtgacattagttccagtagcagcttcctctcaaccagctcgtctgcgtccagtttctcctctcaggcatcagcttcttctaccagcggtgctggctacaccggatcttctggttacacaggaccaaagggtggcggagcgcagttcggttctgcttcaggccaaagctctttcggtcagacatcaggatttaccgcatcttctggcggacaagccgctttcggtggaaccagtggagcgtctgctggcctcatctccggagtagcaaacgcacttgccaatacatccacattgagagctgtcttccgaagaggtgtatcccaacagactgcctccagcgtggtacagagagccgctcagtcgttggccagtactctcggagtcgacggaaacaacttgtccagagtagcattacaagccatctctcaagtgcccacagggtctgacacttcagcttacgctcaagccttctctagtgcgctcttcaatgccggagttctcaatgcaagcaacattgacacattgggatcccgagttctctcagctgttttgaacggagtatcaagtgcggcgcaaggtcttggcatcaatgtagataccggcagtgtacagagtgacattagttccagtagcagcttcctctcaaccagctcgtctgcgtccagtttctccactcaggcatcagcttcttctaccagcggtgctggctacaccggaccttctggctacataggaccagtgggtggcggagcgcagttcggttctgcttcaggccaaagctctttcggtcagacatcaggatttaccgcatcttctggcggacaagccgctttcggtggaaccagtggagcgtctgctggcctcatctccagagtagcaaacgcacttgccaatacatccacattgagagctgtcctccgaagaggtgtatcccaacagactgcttccagcgtggtacagagagccgctcagtcgttggccagtactctcggagtcgacggaaacaacttgtccagagtagcattacaagccatctctcaagtgcccacagggtctgacacttcagcttacgctcaagccttctctagtgcgctcttcaatgccggagttctcaatgcaagcaacatagacacattgggatcccgagttctctcagctgttttgaacggagtatcaagtgcggcgcaaggtcttggcatcaatgtagataccggcagtgtgcagagtgacattagttccagtagcagcttcctctcaaccagctcgtctgcgtccagtttctcctctcaggcatcagcttcttctaccagcggtgctggctacaccggaccttctggctacacaggaccagtgggtggcggagcgcagttcggttctgcttcaggccaaagctctttcggtcagacatcaggatttaccgcatcttctggcggacaagccgctttcggtggaaccagtggagcgtctgctggcctcatctccagagtagcaaacgcacttgccaatacatccacattgagagctgtcctccgaagaggtgtatcccaacagactgcctccagcgtggtacagagagccgctcagtcgttggccagtactctcggagtcgacggaaacaacttgtccagagtagcattacaagccatctctcaagtgcccacagggtctgacacttcagcttacgctcaagccttctctagtgcactcttcaatgccggagttctcaatgcaagcaacattgacacattgggatcccgagttctctcagctgttttgaacggagtatcaagtgcggcgcaaggtcttggcatcaatgtagataccggcagtgtgcagagtgacattagttccagtagcagcttcctctcaaccagctcgtctgcgtccagtttctcctctcaggcatcagcttcttctaccagcggtgctggctacaccggaccttctggctacacaggaccagtgggtggcggagcgcagttcggttctgcttcaggccaaagctctttcggtcagacatcaggatttaccgcatcttctgatggacaagccgctttcggtggaaccagtggagcgtctgctggcctcatctccagagtagcaaacgcacttgccaatacatccacattgagagctgtcctccgaagaggtgtatcccaacagactgcctccagcgtggtacagagagccgctcagtcgttggccagtactctcggagtcgacggaaacaacttgtccagagtagcattacaagccatctctcaagtgcccacagggtctgacacttcagcttacgctcaagccttctctagtgcgctcttcaatgccggagttctcaatgcaagcaacattgacacattgggatcccgagttctctcagctgttttgaacggagtatcaagtgcggcgcaaggtcttggcatcaatgtagataccggcagtgtgcagagtgacattagttccagtagcagcttcctctcaaccagctcgtctgcgtccagtttctcctctcaggcatcagcttcttcttccggcggtgctggctacaccgaaccttctggctacacaggaccagtgggtggcggagcgcagttcggttctgcttcaggccaaagctctttcggtcagacatcaggatttaccgcatcttctgatggacaagccgctttcggtggaaccagtggagcgtctgctggcctcatctccagagtagcaaacgcacttgccaatacatccacattgagagctgtcctccgaagaggtgtatcccaacagactgcctccagcgtggtacagagagccgctcagtcgttggccagtactctcggagtcgacggaaacaacttgtccagagtagcattacaagccatctctcaagtgcccacagggtctgacacttcagcttacgctcaagccttctctagtgcgctcttcaatgccggagttctctatgcaagcaacattgacacattgggatcccgagttctctcagctgttttgaacggagtatcaagtgcggcgcaaggtcttggcatcaatgtagataccggcagtgtacagagtgacattagttccagtagcagcttcctctcaaccagctcgtctgcgtccagtttctcctctcaggcatcagcttcttctaccagcggtgctggctacaccggaccttctggctacacaggaccaaagggtggcggagcgcagttcggttctgcttcaggccaaagctctttcggtcagacatcaggatttaccgcatcttctagcggacaagccgctttcggtggaaccagcggagcgtctgctggcctcatctccagagtagcaaacgcacttgccaatacatccacattgagagctgtcctccgaagaggtgtatcccaacagactgcctccagcgtggtacagagagccgctcagtcgttggccagtactctcggagtcgacggaaacaacttgtccagagtagcattacaagccatctctcaagtgcccacagggtctgacacttcagcttacgctcaagccttctctagtgcgctcttcaatgccggagttctcaatgcaagcaacattgacacattgggatcccgagttctctcagctgttttgaacggagtatcaagtgcggcgcaaggtcttggcatcaatgtagataccggcagtgtgcagagtgacattagttccagtagcagcttcctctcaaccagctcgtctgcgtccagtttctcctctcaggcatcagcttcttctaccagcggtgctggctacaccggaccttctggctacacaggaccagtgggtggcggagcgcagttcggttctgcttcaggccaaagctctttcggtcagacatcaggatttaccgcatcttctgatggacaagccgctttcggtggaaccagtggagcgtctgctggcctcatctccagagtagcaaacgcacttgccaatacatccacattgagagctgtcctccgaagaggtgtatcccaacagactgcctccagcgtggtacagagagccgctcagtcgttggccagtactctcggagtcgacggaaacaacttgtccagagtagcattacaagccatctctcaagtgcccacagggtctgacacttcagcttacgctcaagccttctctagtgcgctcttcaatgccggagttctcaatgcaagcaacattgacacattgggatcccgagttctctcagctgttttgaacggagtatcaagtgcggcgcaaggtcttggcatcaatgtagataccggcagtgtgcagagtgacattagttccagtagcagcttcctctcaaccagctcgtctgcgtccagtttctcctctcaggcatcagcttcttctaccagcggtgctggctacaccgaaccttctggctacacaggaccagtgggtggcggagcgcagttcggttctgcttcaggccaaagctctttcggtcagacatcaggatttaccgcatcttctgatggacaagccgctttcggtggaaccagtggagcgtctgctggcctcatctccagagtagcaaacgcacttgccaatacatccacattgagagctgtcctccgaagaggtgtatcccaacagactgcctccagcgtggtacagagagccgctcagtcgttggccagtactctcggagtcgacggaaacaacttgtccagagtagcattacaagccatctctcaagtgcccacagggtctgacacttcagcttacgctcaagccttctctagtgcgctcttcaatgccggagttctcaatgcaagcaacattgacacattgggatcccgagttctctcagctgttttgaacggagtatcaagtgcggcgcaaggtcttggcatcaatgtagataccggcagtgtgcagagtgacattagttccagtagcagcttcctctcaaccagctcgtctgcgtccagtttctcctctcaggcatcagcttcttctaccagcggtgctggctacaccggaccttctggctacacaggaccagtgggtggcggagcgcagttcggttctgcttcaggccaaagctctttcggtcagacatcaggatttaccgcatcttctggcggacaagccgctttcggtggaaccagtggagcgtctgctggcctcatctccagagtagcaaacgcacttgccaatacatccacattgagagctgtcctccgaagaggtgtatcccaacagactgcctccagcgtggtacagagagccgctcagtcgttggccagtactctcggagtcgacggaaacaacttgtccagagtagcattacaagccatctctcaagtgcccacagggtctgacacttcagcttacgctcaagccttctctagtgcactcttcaatgccggagttctcaatgcaagcaacattgacacattgggatcccgagttctctcagctgttttgaacggagtatcaagtgcggcgcaaggtcttggcatcaatgtagataccggcagtgtacagagtgacattagttccagtagcagcttcctctcaaccagctcgtctgcgtccagtatctcctctcaggtatcagcttcttctaccagcggtgctggctacaccggaccttctggctacacaggaccagtgggtggcggagcgcagttcggttcttcttcaggccaaagctctttcggtcaaacatcaggatttacaacttccgctggcctcttaggagccacgtctggatcgctgtctggtgctggacaatctgctggagtatctttaacgtcttctcttaattcgcccgttggattaagatctggttctgctgcttctagaatcaggcaattaacttcatctgtgacgaatgcggtcggccccaatggagttgatgctaatgcacttgcccgtagtcttcaatctagtttctcgaatctgagaagttccggaatgtcctctagcgatgctaaaattgaagttttgctagaaaccatagtcagtctgctgcaacttttgagcaacacacagattcgaggagtgaatccggcaacggcatcttccgtggccaattctgctgccagatcctttgaattagttttagcttaaacaggtattgattgttaaacctaaagatatatataacttttttgaaatgtaatttagagataaaatttcttgttaaataaaaagcattattaaaacgcattattccatgtatttcttcatttaaaattttttgtcttaaactattgatttttttagaatgtttatatatatacgatttttattctttatcaactaaattattttaccagcaggttttgataccgatattttaaccattagttaagtgttgataaaaaattaacccaggaagaagtaaaaaaccttttttaactaaataaaataaattaatttaataaattattaatgaaagatttttaatgctattacttagttgacatctactatcttatattggaaatatgttatttgtattctttcaataactgttggagaaaatagtcatattgtgaaaatataagtcgtatttaacccattttctgccacgagtgccacgtggttggcaggttgtaacccattggtagcacgaatagactcgtgatactttcaatatattataaggtacaacttgtcaaactttttatggccacaaacataaatatacaagtgtaaaaacttgaaaaaaatgctacaaataaatagtttttacaaaaattctactttatttaacccatttgctgtcaagcctgaattgtatgaggttattcccattgccaaccacgagtatactcgtgtttgatttttatacacgtaaatgataatttatgacaaaatatgtgtatttattttgaaataataaaatttagataaacaataacactcaaaacagaaatggcaatgggattaacctcatacaatttagacttggcagtaaatgggttaaatataagtgtcgcctggtaaataacaatttcatttcttttgcattatgaagcaacaatagaacagagaaagtatttaagtaaaccggatttatttcgaaattctttaattacaaattatattcagaaacttttagaggaaatttgaacataagatattcatttagattctgttcataagtttttaggaagattttaccaatattaagattttgagtaaacatcagttaaagacatagtataaaataagtaatgtaacaaacaattttttaaaatcaattcctacttagattaacaaagatttcttttatattttggttactttttttaaataattacatttaatataaatatgtgtataactatgacagaatcataatattaagtgataaaacaggaagtgaatttcctggcaatttttattctcctttctaaatatggtgttcgaattcacagcccgagggatgcgaatccaacgccataccaaccagactatcctggtgtgataattacgattactacaaataattgagcaagaaattgtactagcgttgaattttcaacgtcaattgaggtttcaaagccaattgtgacaacgcaaaacgcgatatttttctacaccagttgaaaaacgcaatacatattagaaatttcttattttctttagtctatattattttaattcgaaagtacttcataatgaatcgaaaaaaaaaaaaaaaaacgattcatcaacagtgtttggttttaaatgcaccaaaaattatgaaaataaatagaatcgttttaaataagaggctgaaaacatgttaagccggcttgctggcacagaggtagcgcatcttcctcgtgttctgtgagtcccggttcggacatggttgttcttctgtgttctatctgtgagatgtgtgaatgtgccccctctcctgtaaaagggggctgtgcaagcgtgtgggtgggtgtttcatcctcatatgagctagaagtcagacttctgtcctcgaatgctcaggggacaatatcttcagaagttactgcaccctatttccgttgtaaaaagtggacacatcatcatcaaaacatgttaagcttaacctcactggcttggttgaattcgctacttatttggcattgggggaattaagatgtttggcgagagaattagcttttaattagttaataaaaaattaatgaattattattcgaaaaattgtcatcagcatcaaatgtcatcccctacgagttaaaaaaattgaaaatttacttgaacttgtgtggatgaatagaaagtattttattaatgattgaaaattatatatatatatatatatatatatatatatatatatatatataatatgagtgtgagctaaaagtacgaaatgaatagtaaattaatcattgccctaaaacttacagacattttttatgaatctctatctataatacataattatgtgccctgcttaattgtattttatagatgagacaatgaagatacgaattcaaaacacatctgaataaataataatttcgaagacaaatttttcaatccctttcaagaaaaattaagaacttgcattaatgaaaacgttttagttttggaacaatatgaaacaatgaaatttgttaagttcgaccggaatgtagcagttccctgcaaatatatgaaacaatgaaatttgctaagttgcgccggaatgcggccgttccctgcaaatatatgaaacgatgaaatttgctaagttgggccggaatgcggccgttccctgcaaatatatgaaacaatgaatttttctaacttgggccggaatatagcagttccctgcaaatatatgaaacaatgaatttttctaacttgggccggaatatagcagtt

SEQ ID NO: 87 - protein, 4479 aa, Argiope argentata
MNWLPTLAFAILLLSVQYDAVQSASTLSRSPWANPAKAGSLMNCLMSRIASSNVLPQQDKEDLESIMDTLMSAIKGASAKGKSSAAQLQAINMAVASSLAEIVVAEDAGNQASIAVKTQALTGALGQCFQAVMGTVDRKFINEINDLITMFAKEAASESNEIPDQESFSASGSSASTSYQAASQSFQGSSQTTGGISTYPQPQVSQSATFGIGSVGNTGGAGSYGGGLQSGSVTGGTSFGQTSTLSTSLSQTGGISTSGAGYNGPVGYRGPVGGGSQFGTDSSQTANLISRVANALSNTSTLRTVLRRGVSQQIASSILRRAAQTLASTLGVDGNNLSRVALQAISQVPTGSDTSAYAQAFSSALFNAGVLNASNIDTLGSRVLSAVLNGVSSAAQGLGINVDTGSVQSDISSSSSFLSTSSSASSFSSQASASSTSGAGYTGPSGYTGPVGGGAQFGSASGQSSFGQTSGFTASSGGQAAFGGTSGASAGLISRVANALANTSTLRAVLRRGVSQQTASSVVQRAAQSLASTLGIDGNNLSRVALQATSQVPTGSDTSAYAQAFSSALFNAGVLNASNIDTLGSRVLSAVLNGVSSAAQGLGINVDTGSVQSDISSSSSFLSTSSSASSFSSQASASSTSGAGYTGPSGYTGPVGGGAQFGSASGQSSFGQTSGFTASSGGQAAFGGTSGASAGLISRVANALANTSTLRAVLRRGVSQQTASSVVQRAAQSLASTLGVDGNNLSRVALQAISQVPTGSDTSAYAQAFSSALFNAGVLNASNIDTLGSRVLSAVLNGVSSAAQGLGINVDTGSVQSDISSSSSFLSTSSSASSFSSQASASSTSGAGYTGPSGYTGPVGGGAQFGSASGQSSFGQTSGFTASSGGQAAFGGTSGASAGLISRVANALANTSTLRAVLRRGVSQQTASSVVQRAAQSLASTLGVDGNNLSRVALQAISQVPTGSDTSAYAQAFSSALFNAGVLNASNIDTLGSRVLSAVLNGVSSAAQGLGINVDTGSVQSDISSSSSFLSTSSSASSFSSQASASSTSGAGYTGPSGYTGPVGGGAQFGSASGQSSFGQTSEFTASSGGQAAFGGTSGASAGLISRVANALANTSTLKAVLRRGVSQQTASSVVQRAAQSLASTLGVDGNNLSRVALQAISQVPTGSDTSAYAQAFSSALFNAGILNASNIDTLGSRVLSAVLNGVSSAAQGLGINVDTGSVQSDISSSSSFLSTSSSASSFSSQASASSTSGAGYTGPSGYTGPVGGGAQFGSASGQSSFGQTSGFTASSGGQAAFGGTSGASAGLISRVANALANTSTLRAVLRRGVSQQTASSVVQRAAQSLASTLGVDGNNLSRVALQAISQVPTGSDTSAYAQAFSSALFNAGVLNASNIDTLGSRVLSAVLNGVSSAAQGLGINVDTGSVQRDISSSSSFLSTSSSASSFSSQASASSTSGAGYTGPSGYTGPVGGGAQFGSASGQSSFGQTSGFTASSGGQAAFGGTSGASAGLISRVANALANTSTLKAVLRRGVSQQTASSVVQRAAQSLASTLGVDGNNLSRVALQAISQVPTGSDTSAYAQAFSSALFNAGVLNASNIDTLGSRVLSAVLNGVSSAAQGLGINVDTGSVQSDISSSSSFLSTSSSASSFSSQASASSTSGAGYTGPSGYTGPVGGGAQFGSASGQSSFGQTSGFTASSGGQAAFGGTSGASAGLISRVANALANTSTLRAVFRRGVSQQTASSVVQRAAQSLASTLGVDGNNLSRVALQAISQVPTGSDTSAYAQAFSSALFNAGVLNASNIDTLGSRVLSAVLNGVSSAAQGLGINVDTGSVQSDISSSSSFLSTSSSASSFSSQASASSTSGAGYTGPSGYTGPVGGGAQFGSASGQSSFGQTSGFTASSGGQAAFGGTSGASAGLISRVANALANTSTLRAVLRRGVSQQTASSVVQRAAQSLASTLGVDGNNLSRVALQAISQVPTGSDTSAYAQAFSSALFNAGVLNASNIDTLGSRVLSAVLNGVSSAAQGLGINVDTGSVQSDISSSSSFLSTSSSASSFSSQASASSTSGAGYTGPSGYTGPVGGGAQFGSASGQSSFGQTSGFTASSGGQAAFGGTSGASADLISRVANALANTSTLRAVLRRGVSQQTASSVVQRAAQSLASTLGVDGNNLSRVALQAISQVPTGSDTSAYAQAFSSALFNAGVLNASNIDTLGSRVLSAVLNGVSSAAQGLGINVNTGSVQSDISSSSSFLSTSSSASSFSSQASASSTSGAGYTGPSGYTGPVGGGAQFGSASGQSSFGQTSGFTASSGGQAAFGGTSGASAGLISRVANALANTSTLRAVLRRGVSQQTASSVVQRAAQSLASTLGVDGNNLSRVALQAISQVPTGSDTSAYAQAFSSALFNAGVLNASNIDTLGSRVLSAVLNGVSSAAQGLGINVDTGSVQSDISSSSSFLSTSSSASSFSSQASASSTSGAGYTGSSGYTGPKGGGAQFGSASGQSSFGQTSGFTASSGGQAAFGGTSGASAGLISGVANALANTSTLRAVFRRGVSQQTASSVVQRAAQSLASTLGVDGNNLSRVALQAISQVPTGSDTSAYAQAFSSALFNAGVLNASNIDTLGSRVLSAVLNGVSSAAQGLGINVDTGSVQSDISSSSSFLSTSSSASSFSTQASASSTSGAGYTGPSGYIGPVGGGAQFGSASGQSSFGQTSGFTASSGGQAAFGGTSGASAGLISRVANALANTSTLRAVLRRGVSQQTASSVVQRAAQSLASTLGVDGNNLSRVALQAISQVPTGSDTSAYAQAFSSALFNAGVLNASNIDTLGSRVLSAVLNGVSSAAQGLGINVDTGSVQSDISSSSSFLSTSSSASSFSSQASASSTSGAGYTGPSGYTGPVGGGAQFGSASGQSSFGQTSGFTASSGGQAAFGGTSGASAGLISRVANALANTSTLRAVLRRGVSQQTASSVVQRAAQSLASTLGVDGNNLSRVALQAISQVPTGSDTSAYAQAFSSALFNAGVLNASNIDTLGSRVLSAVLNGVSSAAQGLGINVDTGSVQSDISSSSSFLSTSSSASSFSSQASASSTSGAGYTGPSGYTGPVGGGAQFGSASGQSSFGQTSGFTASSDGQAAFGGTSGASAGLISRVANALANTSTLRAVLRRGVSQQTASSVVQRAAQSLASTLGVDGNNLSRVALQAISQVPTGSDTSAYAQAFSSALFNAGVLNASNIDTLGSRVLSAVLNGVSSAAQGLGINVDTGSVQSDISSSSSFLSTSSSASSFSSQASASSSGGAGYTEPSGYTGPVGGGAQFGSASGQSSFGQTSGFTASSDGQAAFGGTSGASAGLISRVANALANTSTLRAVLRRGVSQQTASSVVQRAAQSLASTLGVDGNNLSRVALQAISQVPTGSDTSAYAQAFSSALFNAGVLYASNIDTLGSRVLSAVLNGVSSAAQGLGINVDTGSVQSDISSSSSFLSTSSSASSFSSQASASSTSGAGYTGPSGYTGPKGGGAQFGSASGQSSFGQTSGFTASSSGQAAFGGTSGASAGLISRVANALANTSTLRAVLRRGVSQQTASSVVQRAAQSLASTLGVDGNNLSRVALQAISQVPTGSDTSAYAQAFSSALFNAGVLNASNIDTLGSRVLSAVLNGVSSAAQGLGINVDTGSVQSDISSSSSFLSTSSSASSFSSQASASSTSGAGYTGPSGYTGPVGGGAQFGSASGQSSFGQTSGFTASSDGQAAFGGTSGASAGLISRVANALANTSTLRAVLRRGVSQQTASSVVQRAAQSLASTLGVDGNNLSRVALQAISQVPTGSDTSAYAQAFSSALFNAGVLNASNIDTLGSRVLSAVLNGVSSAAQGLGINVDTGSVQSDISSSSSFLSTSSSASSFSSQASASSTSGAGYTEPSGYTGPVGGGAQFGSASGQSSFGQTSGFTASSDGQAAFGGTSGASAGLISRVANALANTSTLRAVLRRGVSQQTASSVVQRAAQSLASTLGVDGNNLSRVALQAISQVPTGSDTSAYAQAFSSALFNAGVLNASNIDTLGSRVLSAVLNGVSSAAQGLGINVDTGSVQSDISSSSSFLSTSSSASSFSSQASASSTSGAGYTGPSGYTGPVGGGAQFGSASGQSSFGQTSGFTASSGGQAAFGGTSGASAGLISRVANALANTSTLRAVLRRGVSQQTASSVVQRAAQSLASTLGVDGNNLSRVALQAISQVPTGSDTSAYAQAFSSALFNAGVLNASNIDTLGSRVLSAVLNGVSSAAQGLGINVDTGSVQSDISSSSSFLSTSSSASSISSQVSASSTSGAGYTGPSGYTGPVGGGAQFGSSSGQSSFGQTSGFTTSAGLLGATSGSLSGAGQSAGVSLTSSLNSPVGLRSGSAASRIRQLTSSVTNAVGPNGVDANALARSLQSSFSNLRSSGMSSSDAKIEVLLETIVSLLQLLSNTQIRGVNPATASSVANSAARSFELVLA

SEQ ID NO: 88 - DNA, 2437 bp, Poecilotheria regalis
  CDS (1)..(2259)
gcagtagcttccgcaggtaacaacgctggtgcttatgcctatgctcgagcttatgcgtctgcaatctctcagtctctctccagtttaggaatactaaattcaggaaacgccattgctcttgcaaacgcattctcaagtggtgcgtccgatagcgccgcggccgccgcactttcagccgcgtctgcatccgcagcatcagctgctaccgccgtatctacgacaaccagcaccagcacttccgcagcaacagcggccgccgcagccgcctcagcagcaggagccgccggcgcaggagcagctgcaggtgctacggcctcttcgtcgttcggacagaatctgctgtccggcttactaagaagcgatgcggtcgtctcagcgttaagccaagcatactccgcctctactgcatctgccctcgcatcgtcctacgctcagagcggagcagatagagcaggtttcggcaactacggctcggttatcgcttcggccgctgcatcagcagtagcttccgcaggtaacaacgctggtgcttatgcctatgctcgagcttatgcgtctgcaatctctcagtctctctccagtttaggaatactaaattcaggaaacgccattgctcttgcaaacgcattctcaagtggtgcgtccgatagcgccgcggccgccgcagtttcagccgcgtctgcgtccgcagcatcagctgctaccgcctcatctaggacaaccagcaccagcacttccgcagcaacagcggccgccgcagccgcctcagcagcaggatccgccggcgcaggagcagctgcaggtgctacggcctcttcgtcgttcggacagaatctgctgtccggcttactaagaagcgatgcggtcgtctcagcgttaagccaagcatactccgcctctactgcatctgccctcgcatcgtcctacgctcagagcggagcagatagagcaggtttaggcaactacggctcggttatcgcttcggccgctgcatcagcagtagcttccgcaggtaacaacgctggtgcttatgcctatgctcgagcttatgcgtctgcaatctctcagtctctctccagtttacgaatactaaattcaggaaacgccattgctcttgcaaacgcattctcaagtggtgcgtccgatagcgccgcggccgccgcactttcagccgcgtctgcatccgcagcatcagctgctaccgccgcatctacgacaaccagcaccagcacttccgcagcaacagcggccgccgcagctgcctcggcagcaggagccgccggcgcaggagcagctgcaggtgctacggcctcttcgtcgttcggacagaatctgctgtccggcttactaagaagcgatgcggtcgtctcagcgttaagccaagcatactccgcctctactgcatctgccctcgcatcgtcctacgctcagagcggagcagatagagcaggtttaggcaactacggctcagttatcgcttcggccgctgcatcagcagtagcttccgcaggtaacaacgctggtgcttatgcctatgctcgagcttatgcgtctgcaatctctcagtctctctccagtttaggaatactaaattcaggaaacgccattgctcttgcaaacgcattcacaagtggtgcatcctctaacgcgtcgtccgcggccgccgcagcttcaaccgtgttagctggagttgctcctgccggttcatctgcaagcagttcagcagcatcagcctccaccggagccggagctgcaatcagttctgtcgggccagcagttggtttcggtgctggcccagcacctgctggtggtttggtctcaggtttacctggctacagtcccttaaaccaaggctttactccatatcccggagttcccctcccgacaggttctggtgtctctgctcctgttcccgtttcgcctttgcccttaggtcttttaccatcttctttagatttatcgtcaccttctgcaactggaagaatgtcgtctctggtacgatctcttttgtccgcagtttcttccggcggtttgaattcctccctgcttggaagcaccttgacttccttggtatcccagatttcttcaagtcgcagcgatctgtcggcctcacaggtcttagttgaagctgttcttgagattttatctgctgttattcagatcctttcgtctgctacaattggagttgtgagtaccgattcagtaggtgcgacatctagtgctgttgctcaagctgtgtcctctgcttttgctggataacgatttgatatccatgtgctgtgttaaatttgttttcaaagaaaattcttgtgtcattatcaatctgtcaattatttttgttttttgaaaattgtaattttttgtttgatattcctgtctgtgtttgtaagggcaagggttgtaatttgtaaccaaacttgcatacggaataaaagca

SEQ ID NO: 89 - protein, 752 aa, Poecilotheria regalis
AVASAGNNAGAYAYARAYASAISQSLSSLGILNSGNAIALANAFSSGASDSAAAAALSAASASAASAATAVSTTTSTSTSAATAAAAAASAAGAAGAGAAAGATASSSFGQNLLSGLLRSDAVVSALSQAYSASTASALASSYAQSGADRAGFGNYGSVIASAAASAVASAGNNAGAYAYARAYASAISQSLSSLGILNSGNAIALANAFSSGASDSAAAAAVSAASASAASAATASSRTTSTSTSAATAAAAAASAAGSAGAGAAAGATASSSFGQNLLSGLLRSDAVVSALSQAYSASTASALASSYAQSGADRAGLGNYGSVIASAAASAVASAGNNAGAYAYARAYASAISQSLSSLRILNSGNAIALANAFSSGASDSAAAAALSAASASAASAATAASTTTSTSTSAATAAAAAASAAGAAGAGAAAGATASSSFGQNLLSGLLRSDAVVSALSQAYSASTASALASSYAQSGADRAGLGNYGSVIASAAASAVASAGNNAGAYAYARAYASAISQSLSSLGILNSGNAIALANAFTSGASSNASSAAAAASTVLAGVAPAGSSASSSAASASTGAGAAISSVGPAVGFGAGPAPAGGLVSGLPGYSPLNQGFTPYPGVPLPTGSGVSAPVPVSPLPLGLLPSSLDLSSPSATGRMSSLVRSLLSAVSSGGLNSSLLGSTLTSLVSQISSSRSDLSASQVLVEAVLEILSAVIQILSSATIGVVSTDSVGATSSAVAQAVSSAFAG

SEQ ID NO: 90 - DNA, 744 bp, Aliatypus aquilonius
  CDS (3)..(743)
ccgatgctcatgcttacgctgaagcaatttcgggcgcactgtctcgtgcattactttacaacggaacattgaactctgctaacgccatttctcttgccaacgcctttgcttacgctttcgccagtggcgttgcgcaggcctcagcatccgcatcagcagatggtgctacttctgcaacaggtgcatcgtcagcatccgcagcaggatctgcatcaagcagctggaccaccataacgaccgaaagcacttcagcgtctgccgccgctgctgctgctgccgctgccgcctccgatttgtctggttctaggtcacatgctcaatcatcgtcgaattccggagaattcaacattgtaggtgataaccttggtttggattacatttctggtgggattcttccagttaatactcctgttttggatttttcttctgatttgggttcattaacatctggtttgctctcctctctggatgggcctgttttaccttctgttgactatagaataacttcttttacttcatcagtactttctttactttccactagtggaggtgcctttaattattcgtccttcgcgaagaacttggctattttggcatatcaaatcagtgttagcaatcctgggttgactgtatctcaagttgtttcggaagctctgcttgaatctgtcggtgcattaatccatattttattgtcttcacgggttggatctctaagtactgctgattcgagttcagctgctagag

SEQ ID NO: 91 - protein, 247 aa, Aliatypus aquilonius
DAHAYAEAISGALSRALLYNGTLNSANAISLANAFAYAFASGVAQASASASADGATSATGASSASAAGSASSSWTTITTESTSASAAAAAAAAAASDLSGSRSHAQSSSNSGEFNIVGDNLGLDYISGGILPVNTPVLDFSSDLGSLTSGLLSSLDGPVLPSVDYRITSFTSSVLSLLSTSGGAFNYSSFAKNLAILAYQISVSNPGLTVSQVVSEALLESVGALIHILLSSRVGSLSTADSSSAAR

SEQ ID NO: 92 - DNA, 4897 bp, Megahexura fulva
  CDS (1)..(4896)
caagcaagttattatgcatctgcttcggcacaggccgccgcaagtgcggcaggatttggaagctcggtcgcaaatgctgttgctagcgctagtgcgagcgcagctggaggagtttcagtcggtgccggagctcaagcatacgcttcagcacttggcaatggccttggtcaagccctactggcaaatggtgttctcaattcagggaactatttacaacttgctaattccctggcatattcgttcggatctagtctgtcccaatattcgtcttcagctgcaggcgcttccgccgcaggtgcagcttccggagctgctggcgccggtgcaggtgcagcatcgtcgggaggatcttccggctcggcgagttcatcgacaacgaccacgacaactacgtcaacatctgcagcagcagcagcagcagcagcagccgccgcagcctcagctgcagcgtccacttctgcgtcggcgtctgcttcggctagcgcatccgcatcagcattttcgcaaactttcgtccaaacggttctacagtcagcagcattcggctcctatttcggaggcaacctatccttacaatcggcacaagccgccgcatcagcagctgcccaagccgctgcacaacagatcggtcttggatcgtacggttatgctctcgcaaacgctgtcgcaagtgctttcgcaagcgctggcgctaatgccggttcttatgcctacgctcaggccgctgcaggcgcttttgctaacgttctgttccaagcgggagttttgacctacgctaacgccagcgcccttgcctcagcctatgcaagcgcttatgcaagcagtgtcgcttcggctgccgcatcagcatctgccggtgcttcggcatcaagcggtgcgtctgcctctgcctctgccgctgccgctgctgccgccgcagctgccgcgtctgcttctgccggcgcatcagcctctgccggcgcatcagcctctgccggcgcatcagcctctgcttcagcatcggcaaccgcctctgcgtttgcatcagcctttgcgtcagctgtcgttcaaactggctatttctcgaacgttttcggaaatgtctattcggctgcccaagcaagttattatgcatctgcttcggcacaggccgccgcaagtgcggcaggatttggaagctcggtcgcaaatgctgttgctagcgctagtgcgagcgcagctggaggagtttcagtcggtgccggagctcaagcatacgcttcagcacttggcaatggccttggtcaagccctactggcaaatggtgttctcaattcagggaactatttacaacttgctaattccctggcatattcgttcggatctagtctgtcccaatattcgtcttcagctgcaggcgcttccgccgcaggtgcagcttccggagctgctggcgccggtgcaggtgcagcatcgtcgggaggatcttccggctcggcgagttcatcgacaacgaccacgacaactacgtcaacatctgcagcagcagcagcagcagcagcagccgccgcagcctcagctgcagcgtccacttctgcgtcggcgtctgcttcggctagcgcatccgcatcagcattttcgcaaactttcgtccaaacggttctacagtcagcagcattcggctcctatttcggaggcaacctatccttacaatcggcacaagccgccgcatcagcagctgcccaagccgctgcacaacagatcggtcttggatcgtacggttatgctctcgcaaacgctgtcgcaagtgctttcgcaagcgctggcgctaatgccggttcttatgcctacgctcaggccgctgcaggcgcttttgctaacgttctgttccaagcgggagttttgacctacgctaacgccagcgcccttgcctcagcctatgcaagcgcttatgcaagcagtgtcgcttcggctgccgcatcagcatctgccggtgcttcagcatcaagcggtgcgtctgcctctgcctctgccgctgccgctgctgccgccgcagctgccgcgtctgcttctgccggcgcatcagcctctgccggcgcatcagcctctgccggcgcatcagcctctgcttcagcatcggcaaccgcctctgcgtttgcatcagcctttgcgtcagctgtcgttcaaactggctatttctcgaacgttttcggaaatgtctattcggctgcccaagcaagctattatgcatctgcttcggcacaggccgccgcaagtgcggcaggatttggaagctcggtcgcaaatgctgttgctagcgctagtgcgagcgcagctggaggagtttcagtcggtgccggagctcaagcatacgcttcagcacttggcaatggccttggtcaagccctactggcaaatggtgttctcaattcagggaactatttacaacttgctaattccctggcatattcgttcggatctagtctgtcccaatattcgtcttcagctgcaggcgcttccgccgcaggtgcagcttccggagctgctggcgccggtgcaggtgcagcatcgtcgggaggatcttccggctcggcgagttcatcgacaacgaccacgacaactacgtcaacatctgcagcagcagcagcagcagcagcagccgccgcagcctcagctgcagcgtccacttctgcgtcggcgtctgcttcggctagcgcatccgcatcagcattttcgcaaactttcgtccaaacggttctacagtcagcagcattcggctcctatttcggaggcaacctatccttacaatcggcacaagccgccgcatcagcagctgcccaagccgctgcacaacagatcggtcttggatcgtacggttatgctctcgcaaacgctgtcgcaagtgctttcgcaagcgctggcgctaatgccggttcttatgcctacgctcaggccgctgcaggcgcttttgctaacgttctgttccaagcgggagttttgacctacgctaacgccagcgcccttgcctcagcctatgcaagcgcttatgcaagcagtgtcgcttcggctgccgcatcagcatctgccggtgcttcggcatcaagcggtgcgtctgcctctgcctctgccgctgccgctgctgccgccgcagctgccgcgtctgcttctgccggcgcatcagcctctgccggcgcatcagcctctgccggcgcatcagcctctgcttcagcatcggcaaccgcctctgcgtttgcatcagcctttgcgtcagctgtcgttcaaactggctatttctcgaacgttttcggaaatgtctattcggctgcccaagcaagttattatgcatctgcttcggcacaggccgccgcaagtgcggcaggatttggaagctcggtcgcaaatgctgttgctagcgctagtgcgagcgcagctggaggagtttcagtcggtgccggagctcaagcatacgcttcagcacttggcaatggccttggtcaagccctactggcaaatggtgttctcaattcagggaactatttacaacttgctaattccctggcatattcgttcggatctagtctgtcccaatattcgtcttcagctgcaggcgcttccgccgcaggtgcagcttccggagctgctggcgccggtgcaggtgcagcatcgtcgggaggatcttccggctcggcgagttcatcgacaacgaccacgacaactacgtcaacatctgcagcagcagcagcagcagcagccgccgcagcctcagctgcagcgtccacttctgcgtcggcgtctgcttcggctagcgcatccgcatcagcattttcgcaaactttcgtccaaacggttctacagtcagcagcattcggctcctatttcggaggcaacctatccttacaatcggcacaagccgccgcatcagcagctgcccaagccgctgcacaacagatcggtcttggatcgtacggttatgctctcgcaaacgctgtcgcaagtgctttcgcaagcgctggcgctaatgccggttcttatgcctacgctcaggccgctgcaggcgcttttgctaccgttctgttccaagcgggagttttgacctacgctaacgccagcgcccttgcctcagcctatgcaagcgcttatgcaagcagtgtcgcttcggctgccgcatcagcatctgccggtgcttcggcatcaagcggtgcgtctgcctctgcctctgccgctgccgctgctgccgccgcagctgccgcgtctgcttctgccggcgcatcagcctctgccggcgcatcagcctctgcttcagcatcggcaaccgcctctgcgtttgcatcagcctttgcgtcagctgtcgttcaaactggctatttctcgaacgttttcggaaatgtctattcggctgcccaagcaagttattatgcatctgcttcggcacaggccgccgcaagtgcggcaggatttggaagctcggtcgcaaatgctgttgctagcgctagtgcgagcgcagctggaggagtttcagtcggtgccggagctcaagcatacgcttcagcacttggcaatggccttggtcaagccctactggcaaatggtgttctcaattcagggaactatttacaacttgctaattccctggcatattcgttcggatctagtctgtcccaatattcgtcttcagctgcaggcgcttccgccgcaggtgcagcttccggagctgctggcgccggtgcaggtgcagcatcgtcgggaggatcttccggctcggcgagttcatcgacaacgaccacgacaactacgtcaacatctgcagcagcagcagcagcagccgccgccgcagcctcagctgcagcgtccacttctgcgtcggcgtctgcttcggctagcgcatccgcatcagcattttcgcaaactttcgtccaaacggttctacagtcagcagcat

SEQ ID NO: 93 - protein, 1632 aa, Megahexura fulva
QASYYASASAQAAASAAGFGSSVANAVASASASAAGGVSVGAGAQAYASALGNGLGQALLANGVLNSGNYLQLANSLAYSFGSSLSQYSSSAAGASAAGAASGAAGAGAGAASSGGSSGSASSSTTTTTTTSTSAAAAAAAAAAAASAAASTSASASASASASASAFSQTFVQTVLQSAAFGSYFGGNLSLQSAQAAASAAAQAAAQQIGLGSYGYALANAVASAFASAGANAGSYAYAQAAAGAFANVLFQAGVLTYANASALASAYASAYASSVASAAASASAGASASSGASASASAAAAAAAAAAASASAGASASAGASASAGASASASASATASAFASAFASAVVQTGYFSNVFGNVYSAAQASYYASASAQAAASAAGFGSSVANAVASASASAAGGVSVGAGAQAYASALGNGLGQALLANGVLNSGNYLQLANSLAYSFGSSLSQYSSSAAGASAAGAASGAAGAGAGAASSGGSSGSASSSTTTTTTTSTSAAAAAAAAAAAASAAASTSASASASASASASAFSQTFVQTVLQSAAFGSYFGGNLSLQSAQAAASAAAQAAAQQIGLGSYGYALANAVASAFASAGANAGSYAYAQAAAGAFANVLFQAGVLTYANASALASAYASAYASSVASAAASASAGASASSGASASASAAAAAAAAAAASASAGASASAGASASAGASASASASATASAFASAFASAVVQTGYFSNVFGNVYSAAQASYYASASAQAAASAAGFGSSVANAVASASASAAGGVSVGAGAQAYASALGNGLGQALLANGVLNSGNYLQLANSLAYSFGSSLSQYSSSAAGASAAGAASGAAGAGAGAASSGGSSGSASSSTTTTTTTSTSAAAAAAAAAAAASAAASTSASASASASASASAFSQTFVQTVLQSAAFGSYFGGNLSLQSAQAAASAAAQAAAQQIGLGSYGYALANAVASAFASAGANAGSYAYAQAAAGAFANVLFQAGVLTYANASALASAYASAYASSVASAAASASAGASASSGASASASAAAAAAAAAAASASAGASASAGASASAGASASASASATASAFASAFASAVVQTGYFSNVFGNVYSAAQASYYASASAQAAASAAGFGSSVANAVASASASAAGGVSVGAGAQAYASALGNGLGQALLANGVLNSGNYLQLANSLAYSFGSSLSQYSSSAAGASAAGAASGAAGAGAGAASSGGSSGSASSSTTTTTTTSTSAAAAAAAAAAASAAASTSASASASASASASAFSQTFVQTVLQSAAFGSYFGGNLSLQSAQAAASAAAQAAAQQIGLGSYGYALANAVASAFASAGANAGSYAYAQAAAGAFATVLFQAGVLTYANASALASAYASAYASSVASAAASASAGASASSGASASASAAAAAAAAAAASASAGASASAGASASASASATASAFASAFASAVVQTGYFSNVFGNVYSAAQASYYASASAQAAASAAGFGSSVANAVASASASAAGGVSVGAGAQAYASALGNGLGQALLANGVLNSGNYLQLANSLAYSFGSSLSQYSSSAAGASAAGAASGAAGAGAGAASSGGSSGSASSSTTTTTTTSTSAAAAAAAAAAASAAASTSASASASASASASAFSQTFVQTVLQSAA

SEQ ID NO: 94 - DNA, 1746 bp, Diguetia canities
  CDS (293)..(1492)
  misc_feature (1710)..(1717): n is a, c, g, or t
ccgtcatgatatctgaacgctcctcgtgaagaaccccttacggctgctctgagcacttgcttctgatttcgctcctgcataagatgagctgcctcccgaagaccgtcgatgctggcttgaagcacttgctcctgcgtcgctggctgccgaagctgaagaggaactgcttgccgcagatgcagatgaaccaaaacttgatccacccttaccagatttattgatgcagactgttttgcctcccacgtcgaagcactgagggatgcatctcccggcgtggcattaagcactaaacatgctgtcttctgctgctgttctaccattagtcgttctttcattgcagctgctgtccaccacagcgtgcgctgaagattctggttacgacatctgtctggagaaatgctctgacctgggtgaaaaatgcgaaacaagaagctaccagcagatttcgccctgccaatatgcttgtgtttgtgacggacgttatacctatcacaatgaccagaactttattggatgtggaacaggaaagtactgctacaatggtgaatgtcgtacctctgttctttctgcatgccgtaaaatttacggtccttcgtttgttggacttgaggatcctgtaaacccctgcgtcttcaactgcttcaacgctaggaatctttgcggcattctcgaagagcattaccctgatggtaaaacatgcattgtgccctttaattcaggattaggagtttgccacgccgggagatgcatccctcagtgcttcgacgtgggaggcaaaacagtctgcatcaataaatctggtaagggtggatcaagttttggttcatctgcatctgcggcaagcagttcctcttcagcttcggcagccagcgacgcaggagcaagtgcttcaagccagcatcgacggtcttcgggaggcagctcatcttatgcaggagcgaaatcagaagcaagtgctcagagcagccgtcgaggttcttcacgaggagcgttcagatatcatgacggcacggcgtcttctgcattcagtagaagcagctcagaatcaggtgctacaagcaatagaggtggttccaggtctagatctgcagcaaccagctcatctggggcagaatcacaatcagactatgatgatggattttattattcttcggcttcttctaactccgcctccgcggctcattcgtcaagtgaagacgacactttagaaagagtattgagcggtaaatcatctcattctggcagcggtggtgcaaagagtggtggtggtgcgggtggtgctgctggatctgctgcaaatgcggctgccggcagcagtagtggagctggtggtggtgcaggtggagctgctgccggtgccagttcaggtgcaaccagtaaagcaggttctgccgctggtggtgcaggaggagccgctagcggtgccggttcaggtgcaaccagtacagcaggtgctgccgctggaggtgcaggtggtgccgtaggcatctaattattgggttgttgggcatatcctaggcgcagcaytaattctgctgtttgtgtaggggtgagcttaacttgatgctgtgatgttagcgctacctgtcgtgtctaactcatctgtctgaatgtatgtgaatccacatgcaatgcaaattcgtattcaatttttgacctatagcttttatcaatgaaagtaagccgatttatttcaaataaagctttcgnnnnnnnnaaaaaaaaaaaaaaaaaaaaaaaaaaaaa

SEQ ID NO: 95 - protein, 399 aa, Diguetia canities
MLSSAAVLPLVVLSLQLLSTTACAEDSGYDICLEKCSDLGEKCETRSYQQISPCQYACVCDGRYTYHNDQNFIGCGTGKYCYNGECRTSVLSACRKIYGPSFVGLEDPVNPCVFNCFNARNLCGILEEHYPDGKTCIVPFNSGLGVCHAGRCIPQCFDVGGKTVCINKSGKGGSSFGSSASAASSSSSASAASDAGASASSQHRRSSGGSSSYAGAKSEASAQSSRRGSSRGAFRYHDGTASSAFSRSSSESGATSNRGGSRSRSAATSSSGAESQSDYDDGFYYSSASSNSASAAHSSSEDDTLERVLSGKSSHSGSGGAKSGGGAGGAAGSAANAAAGSSSGAGGGAGGAAAGASSGATSKAGSAAGGAGGAASGAGSGATSTAGAAAGGAGGAVGI

SEQ ID NO: 96 - DNA, 836 bp, Liphistius malayanus
  CDS (50)..(514)
tccagatcgaactgtgaagggtacaaccagaagcaaaagagattgaaaaatgaaggttctgatcgtcacgcttgctctatttgtaatatcagtcgttggcaattatccaccaccacctaagcattgtaaagattgcgataagatatgcggtagtaaacccgaacatcataaatgcaaatgtttggaatatcaaagtattggaccatgttcatattattgtatctgcgatggaacttattactaccataccgtggatgatttcacagaatgtggaaaggacagatactgctactggggagattgcttaggttattctgaaaaatgcccatgtgattgccatggtgattgctacatcggtttggcgcatccttataatccttgcttgtgcaactgttataacaagactgggtgcgatgtgtaccaagaatatttgccttgtggaacctgttgcttcaacgaacagtgttgtgaggcaggaaaatgcgaatatggaaaatgcattcccaattgctaaacaacgatggctattcgtaaagaagtcccagatatcgaattttttgaactatttctacaaaaaatattgagagaatatctggaagaactgtaacttgattttggttccatttaaatataatcaatgtaattaaaaaaagaattatatctcaataagttgaaattaaattgatgaactcctttaccacttgtgttagattatatttattttttttgatgttttaaaaatacataactttccttttattacaaaatatgtaatctgaaagatttaccaataaactgcaaataaatttgaaaaaaaaaaaaaaaaaaaaaaaaaa

SEQ ID NO: 97 - protein, 154 aa, Liphistius malayanus
MKVLIVTLALFVISVVGNYPPPPKHCKDCDKICGSKPEHHKCKCLEYQSIGPCSYYCICDGTYYYHTVDDFTECGKDRYCYWGDCLGYSEKCPCDCHGDCYIGLAHPYNPCLCNCYNKTGCDVYQEYLPCGTCCFNEQCCEAGKCEYGKCIPNC

SEQ ID NO: 98 - DNA, 724 bp, Liphistius malayanus
  CDS (7)..(468)
tgaaaaatgaaggttctgatcgtcacgcttctatttgtaatatcagtcgttggcaattatccaccaccacctaagcattgtaaagattgcgataagatatgcggtagtaaacccgaacatcataaatgcaaatgtttggaatatcaaagtattggaccatgttcatattattgtatctgcgatggaacttattactaccataccgtggatgatttcacagaatgtggaaaggacagatactgctactggggagattgcttaggttattctgaaaaatgcccatgtgattgccatggtgattgctacatcggtttggcgcatccttataatccttgcttgtgcaactgttataacaagactgggtgcgatgtgtaccaagaatatttgccttgtggaacctgttgcttcaacgaacagtgttgtgaggcaggaaaatgcgaatatggaaaatgcattcccaattgctaaacaacgatggctattcgtaaagaagtcccagatatcgaattttttgaactatttctacaaaaaatattgagagaatatctggaagaactgtaacttgattttggttccatttaaatataatcaatgtaattaaaaaaagaattatatctcaataagttgaaattaaattgatgaactcctttaccacttgtgttagattatatttattttttttgatgttttaaaaatacataactttccttttattacaaaatat

SEQ ID NO: 99 - protein, 153 aa, Liphistius malayanus
MKVLIVTLLFVISVVGNYPPPPKHCKDCDKICGSKPEHHKCKCLEYQSIGPCSYYCICDGTYYYHTVDDFTECGKDRYCYWGDCLGYSEKCPCDCHGDCYIGLAHPYNPCLCNCYNKTGCDVYQEYLPCGTCCFNEQCCEAGKCEYGKCIPNC

SEQ ID NO: 100 - DNA, 967 bp, Liphistius malayanus
  CDS (34)..(753)
tcaaggtttagaaatacttagaaatctgaaagtatgaagagtttcttgctggtggttggcatcttggctacgttggccttytgygatgcctacaaaccgaaaccgtgtccctgtgaaaagtactgcggtggcaaatctgaatacgactgcaaaaaatgcaaaactttaaaatatcaatcattttacgacccctgcagttacttctgtgtttgcgatggaaactattactactacgaaaaaaagaattttgagaaatgtggagaatgctcctgcgataggtattgctacaatggtcaatgtctgtcacaacccaaagatggtgactgtagctgcttcggcgactgctatatacctcttaaggatccatataacccatgcaaatacaaatgctacgacaagaacggctgtaaaatatacgaagtggattttccgtgtggaaccgaatgttacaatgattactgctgtgctaaaggagaatgcaagtatggtgaatgtgttgtcgctgattgcaaaggtaaaggcagcagcagcggagcttatggtccagattattacggtatgggatcttcacctggttatgatagtggatcatcatctgcagcatcttcagcagcagcagcagcagctgccactaataaaggagacaatagtgccgcggccgctgcggccgctgctgctgctgctgcgtccggtggctcttcttctgctgctcgtgcttcttcttcttcatcctctagtcgccgtcgtcgttaatgaatctgtgaaatcacagaacaaatcaaaaggaaaagaataacttattcttgtacttctggcatgtttcataatttttgataatcccaataaaattgtcgtcgtttctagtgaagcccctaagtgcttacatgatctgtaatctgtcaattattgcagtaattcaaataaaaattccgaaagatttgaaaaaaaaaaaaaaaaataaaaaaaa

SEQ ID NO: 101 - protein, 239 aa, Liphistius malayanus
MKSFLLVVGILATLAFCDAYKPKPCPCEKYCGGKSEYDCKKCKTLKYQSFYDPCSYFCVCDGNYYYYEKKNFEKCGECSCDRYCYNGQCLSQPKDGDCSCFGDCYIPLKDPYNPCKYKCYDKNGCKIYEVDFPCGTECYNDYCCAKGECKYGECVVADCKGKGSSSGAYGPDYYGMGSSPGYDSGSSSAASSAAAAAAATNKGDNSAAAAAAAAAAAASGGSSSAARASSSSSSSRRRR

SEQ ID NO: 102 - DNA, 969 bp, Liphistius malayanus
  CDS (22)..(720)
aatacttagaaatctgaaagtatgaagagtttcttgctggtggttggcatcttggctacgttggccttttgtgatgcctacaaaccgaaaccgtgtccctgtgaaaagtactgcggcggcaaacctgaattcgactgcaaaaaatgcaaaactttaaaatatcaatcattttacgacccctgcagttacttctgtgtttgcgatggaaactattactactacgaaaaaaagaattttgagaaatgtggagaatgctcctgcgataggtattgctacaatggtcaatgtctgtcacaacccaaagatggtgactgtagctgcttcggcgactgctatatacctcttaaggatccatataacccttgcaaatacaaatgctacgacaagaacggctgtaaaatatacgaagtggattttccgtgtggaaccgaatgttacaatgattactgctgcgctaaaggagaatgcaagtatggtgaatgtgttgtcgctgattgcaaaggtaaaggcaaaagcagcggagcttatggtccagattattacggtatgggatcttcacctggttatgatagtggatcatcatctgcagcatcttcagcagcagcagcagcagctgccactaataaaggagacaatagtgccgcggccgctgcggccgctgctgctgctgctgcgtccggtggctcttcttcttcatcctctagtcgccgtcgtcgttaatgaatctgtgaaatcacagaacaaatcaaaaggaaaagaataacttattcttgtacttctggcatgtttcataatttttgataatcccaataaaattgtcgtcgtttctagtgaagcccctaagtgcttacatgatctgtaatctgtcaattattgcagtaattcaaataaaaattcggaaagaaaaaaaaagaaaagaaaaaaaaaaaagggtacgaaaaagatcctgctcagtgatgaagattctgc

SEQ ID NO: 103 - protein, 232 aa, Liphistius malayanus
MKSFLLVVGILATLAFCDAYKPKPCPCEKYCGGKPEFDCKKCKTLKYQSFYDPCSYFCVCDGNYYYYEKKNFEKCGECSCDRYCYNGQCLSQPKDGDCSCFGDCYIPLKDPYNPCKYKCYDKNGCKIYEVDFPCGTECYNDYCCAKGECKYGECVVADCKGKGKSSGAYGPDYYGMGSSPGYDSGSSSAASSAAAAAAATNKGDNSAAAAAAAAAAAASGGSSSSSSSRRRR

SEQ ID NO: 104 - DNA, 800 bp, Liphistius malayanus
  CDS (2)..(604)
cttgctggtggttggcatcttggctacgttggccttttgtgatgcctacaaaccgaaaccgtgtccctgtgaaaagtactgcggcggcaaacctgaattcgactgcaaaaaatgcaaaactttaaaatatcaatcattttacgacccctgcagttacttctgtgtttgcgatggaaactattactactacgaaaaaaagaattttgagaaatgtggagaatgctcctgcgataggtattgctacaatggtcaatgtctgtcacaacccaaagatggtgactgtagctgcttcggcgactgctatatacctcttaaggatccatataacccttgcaaatacaaatgctacgacaagaacggctgtaaaatatacgaagtggattttccgtgtggaaccgaatgttacaatgattactgctgcgctaaaggagaatgcaagtatggtgaatgtgttgtcgctgattgcaaaggtaaaggcaaaagcagcggagcttatggtccagattattacggtatgggatcttcacctggttatgatagtggatcatcatctgctgcgtccggtggctcttcttcttcatcctctagtcgccgtcgtcgttaatgaatctgtgaaatcacagaacaaatcaaaaggaaaagaataacttattcttgtacttctggcatgtttcataatttttgataatcccaataaaattgtcgtcgtttctagtgaagcccctaagtgcttacatgatctgtaatctgtcaattattgcagtaattcaaataaaaattccgaaagatttgaaaaaaaa

SEQ ID NO: 105 - protein, 200 aa, Liphistius malayanus
LLVVGILATLAFCDAYKPKPCPCEKYCGGKPEFDCKKCKTLKYQSFYDPCSYFCVCDGNYYYYEKKNFEKCGECSCDRYCYNGQCLSQPKDGDCSCFGDCYIPLKDPYNPCKYKCYDKNGCKIYEVDFPCGTECYNDYCCAKGECKYGECVVADCKGKGKSSGAYGPDYYGMGSSPGYDSGSSSAASGGSSSSSSSRRRR

SEQ ID NO: 106 - DNA, 950 bp, Liphistius malayanus
  CDS (123)..(662)
agaacagataggtacaagttcgaaagcagtatatatagccttagagtacagtagtctgccacgtcttcacgctcatttttgaagatcattatcgaagaagggggtcctgaactttctacaagatgaatgtttatgtggcgggaagcttcttattgatttcagtaatcctgacacttggcgacgccaacaaagttaaaccaccgaaagatgtttgcggcgaagaatgcaagaaactggctaaaaagaagtgttacggaaaaaaagaattcgacgccaattgctgtacctctttgtcatatcagcaaaattatgaatgtcaatatcaatgcatctgcaatggcagttattattattataatgaagaattcttaactgaatgtggagagggtaaggtttgcctcgattacagttgcgtgaacatagtagaagacgctgattgtggttctgataattgcgatggcgtaattgccgttgaagatccgtccaatccttgccaataccgatgctacaaaaagaaccaatgtgggtatacactgaacaatttcccttgtggagagccctgcccaatgacctacttgtgtgaaactggacgatgtaacctcggaatatgtgaattttcgcaagacggaaattattgcgaatgtcctgatgaatgtaaataatttatcaatcagataaaaacgtcattaagtgcctacatatttttcccttacgacctcatcaaaaaaatatgaaacctggtattaaacggaatttaaaacttttcgagcaacaaaaatgtatcttacaagtattctgagcatcttctcacataaaatattgatttccatcaaatttatatttcaatgtgtactacaatttaaatctttgttagtaatatttagcatactaacctttttgtgaataaaaaattataaaaactgtcaaaaaaaaaaaaaaaaaaaaaaaaa

SEQ ID NO: 107 - protein, 179 aa, Liphistius malayanus
MNVYVAGSFLLISVILTLGDANKVKPPKDVCGEECKKLAKKKCYGKKEFDANCCTSLSYQQNYECQYQCICNGSYYYYNEEFLTECGEGKVCLDYSCVNIVEDADCGSDNCDGVIAVEDPSNPCQYRCYKKNQCGYTLNNFPCGEPCPMTYLCETGRCNLGICEFSQDGNYCECPDECK
